United States Patent Application Publication US 2015/0354009 A1 - sequence listing, part 11

SEQ ID NO: 264 - DNA, 205254 bp, Homo sapiens
gatttgtcagagcctaggtgaacacttgccactccctcccctcactggtttgcagaggtggcacccggaggctccccatgtctgcaaactcgggtcctagggggcgttggtgtcagcgggcaacagcccacaggagtgtgcacctcctaggacaggtaaccgcgacccggctgccattcgagcctgcccagccataaaacccaggctgcgagtcgcgcgggggcagggtcgcgtgttgatggggtgggtggcggcggggtgggctcaatgtcacgctctggcgctcgtcgcccgtgctcccccttccagccggtttccgcagaatgccaggtactgacgttggagagcggggccggagagggctggttcgctctgcggccgggcccctcccccgcccgggagcttggcggttccgacaccgcggtcagtgcggggcaagccccagacccggccggccaggctgcagggcagggagtaaggctcggttgcgagtgcgcgccgcgccctcccccttgagccgtctccgcagcggcgcggggaggcgggagctgcggggccggagggcgggggctaaaaatacccggcagcggcggcggcggcgcggctactgctggggctgctgggctgcggggctgcggggctgcgggtcggggaggccgggccgggccgggccgggccccgctgaccgccatgctgaccttcttcctcgtgtcggggggctccctctggctattcgtaggtaagtgcccgtcctgtccgcgtcccggactcccatctcccgcaggctatgaggtcttcgcccgaggtggaggtgttacatctccgcggccgccgagcccccatcccctgctgctgagctgtcccgtcaaggtccccagggccgcctaagtacaccctccgcccccagttctcgcgggctccgggccgggtttggggagcacctgggtctgcggagggagatatagggcttgctctctgcgaccccaccacaaacccccgccgagttcttgcgtcccccttccctgatggcaaggaccatccgcggatcagattaggccctgagccaaggccaggaacagacattgcgtccttgtccatctcctgggaccagaaaccgagggtgttggtccccgaggtcccacagcaggtcagctatgtaacccggactgacctaggcttcctgatcccggcgaggggcttcctcacgacccctccctgcccgtccttcagccagagtacaagatttctgtaaggtagggttcacctggctcctctgctctgcccagggctgctgtgtctccactgtttccagacccctcccctccacctcacaggagtcagcttcaccactgcacttcttaggcggctacaaggacccctgctcgatcccgcctccgcgcttacctccctcaaccccccatacacccacacctggagtctcaccacaggcccttttatctgccagttctaccacctgcaccggctacttcccctctctgagcctggggtcctccagagtataataccactaaaggatctccacctccaccccaacccccatgtgcagattcagcctgataatttgtgtgcagtgcttgatccttaaattggccttaaacctgtcctaggccacagcaaatgctctatgaatgttagtgtttattattatctcacattcaaacagcaccatcagaagtggtaataaagctttttctgagccaaggaaggggaggaagttgaccctcttgaaatctttacctgaggctttgtacgtgttatttaatattcatggaaaaccctaggaggtcggtggcaccatccctttttttactgagttcagaggtcaattgacttgcctagtgtcacatggatatttggcagactgggattccattcgaggttttaattgatcaaccaatgctaagtgcttggctggatcaggcctgaacctggagggttggtgggcctagtaatcacttccttcacccccaccatttccttaagttaggccacagggacacttcccctgagctgggagagtgagtgaagcctccctaatcccctcagctccctaagctccttctgtctgccagtgtctgtgactggctgtgcaggggcactctggtcctgaggcacatccagcagacaagggcagggctagagctggggttggaggtaaagggcaaggataattaaaataatggtgatggtggtcgtaacagccaccatttaatgcctgagtgatggatggtctcagagcctctccccactgccaggacccctttgccctaccctcaggaggccccacccaaccatgggtccaaggtcagctctctgaagacttgatcttctgtggctgcagggaggtgtctaggggctgcaagaccacttgtgaccggggtcatcagcagcctgtgagaaaaagtccctcaccctgtggggtccttgtctgtgagcagggttagctggcactgactcaaagtggagtcctgtttccttgtggagcatttcctaaagtggtcagctccctcctctaatgggaaactggggaatctgcctcactgagagactatacagggcctcagaaccgtcaagcaggagcgattcttggggcaggtagtggctgcttccacagaggccgagcttcccaatgcaaaaagcaagaggctgaggctggtctatggtgcttattggatagaataacccagacaattgctggggcattttaagttatgtatccaccctccttgagactccacctggcccccagcctttctctggtggcagaagagactcctgagttaagagctgtagttctgtgagcacacctgagaacatgctctgccttgtcatctccagggtcccatggtcccacggcagctgccagatcccttccactcagccagtaacaggaggcaatgtctctctttagtagagttatgtgctttttgccacctaacctggccctagggagacaaggtagggccaggcaagggtttccctcaagggccctcagggagagatgacataaagtcggggatgggggtgtggcaatgcaccaggaggaggagctgactgttgtttgtgggaggtagccatctgttctgggctgtgtctgtcctgttgcctgctggagaggccagcaatgagtcctgggccagcccagatctcacctgtgtgttgaatactaaacaaggagacaagtaaaataagtccagcatgagtcagatgctaggtctggcttggggaagcatgccctcagtgccataaacacctagaggacaatgggagcagaggatcagagcttctgcctgcctgtacagcacctttgtgcaaagtaggaagaagtctcactcttggtggataactttctaaaagggcacaccttcctctaggctaaggcagccccatgccgcagggtctaatctgttcaatcatatacccaaccatcagtgacatatgagtgggcttctgcagcattcaggggaatttgtcagagatagggaggccaagatccaagtggaggaagccagactagcagagtttgtggaagaactgcaatgggggatgagtcttcaaggtcttgtgcctgagcaatgtgggttgtgggagaggattctggagaaggttttatttggatggtagaggatccctccatttagctgctgagtcaagaggaagagagtggagtccaggagggtagtaggaggtcgttatgatgttatggataagaatagatgtggtccaaggatggcttgagtcatggctgggctccagtaaggagaagagataagcccccacccctggcctctgccttaggagaagtggggctggccctggtggggcgagacaaagttgcccgtctaaagaatggtttggcatgctcctggctatagatgcctagggcaagcatagacttgcacactttggcttagttcaggcctgtgagatcctccccttaccccactctgggctcccattaggacagagaactgacttgaggtctagggccaccccaggggtttggagattgcagttatgaattgggacagatggtagagctccaggcagaacaggtggctctgtggccagctggggacatgcctcacaaagaaagcctgaatttgtacaaggtgcaccagcatggagcaggattttgcccgcagcaccttctcacagctctccagcctatatggtaagaacatactgacaccagggggcagcagaacccagtcattatgctctccagctattgttctgtcccttgtggttataaggattcatgggttgaccttcagaaggctgaatttggctcagctacagccccagatgggactcaggactgtcccatacatggggtgagtgatcatgaggctctggcttgtttataaaaatgggcaaaagttacaggcttttgtataacagaagctacactgtgtatccagccagcactgggcacatagtaggcactcaaatactcattaagtactaggtgtgtgtggaggggtgtttttatgggattaactattgcaaacaggctgacttggctgttgtttcactgagcacctaccatgtgtcaagcaccctgtctatgattctccaaactttccttccatcctcccacaacactgtgttgtgttctccccattgcctaggtgaggccctgagactcagcgaggttcagtggtgaagcaacttgtaagagctgtgagtcaggccacattctcagactttcagtccaggaagggaccaccaggcatgatcagccagccatgttagctaaaattataataacttgtattaggctttccttaaaggggatccaggattctgacatgcagaaagggagtaggaaaagaaaaggcattccaggccaagggacctgtgtgagggaagattggcaataggactgaatgaagttgaaggaccaattctgctgggccagtgaggttgccagaggtgggctctgcaggcctaggataacaggccaaacagcattggctttattctgtgcagcggttatgtcaaggaggtgtgggtagaactgggcatgtggatgaccaaggtgacactattcctgtgctccagaagcctcctccacaagtccatggtctccttgagggcagggccaggtgtctcatgtctatgtccccaacccagagttgggcacacagggtacataagagtttattgcataaactaaagaattccctgagcgtaatttattttaataatgtgttttataagctgtttccttaccacaagtcaatcagtaaacaacagattttgagtgtgctcctgctaggatgctaggctctgtgcccaggtgggggatgatgccaatatgttagaagcagtagggaaaagcaggtgtaaactccttgcaggcagggccaggttacccttcactggagaaccctgtgtgctgagaaccagtgcagcctggaatagaaggaggtgctccagaagtgtttgttgaatgaatgaatgaatcaactagtgaacccacagcttctgggtgaccagttttgtggaagagagtcttctctgagggctgctgcttccttagagctccaaggttccagtcacctgacagattgggagcttgggccactctgccaagcatagatgagaggaattcccagtcaaggtcctcacctcactggatggtctggtgtgatgctcccattccttgcgttggcctcgccagagttcccactaaccatccactgggtccacagattggtggggttaggggagtgctgtggatgagatgctgctttgagcccttggggttgtccttcaggatgcccaggggtggttcctcatcatttgctcggctgcctcgggagatccgtggtaggtgtggttattcctgggcctacttcctttgtgtagctcctaattcatgtgaatcttggggcctgggacaggcagaaatgggaagatgggaagtggattggaacagaaatttcaagccaagccgagctatctattctgagacccaaccaatactctcagagccagaaggatttcaaatcccaagaagtctcacctgaccctatttgccagctcttcccagagatacccttcctctccctgcacctaagccaggcatgtagtaggggcgtctgggggagttgggaatggcttctgatttgccatctgcccatttaagcttgtgttccgagatcactgtctcctgggaatttagagcaggaagccaggccagtgagggaacaatcagcatcttagtgctcagcccctggtataagcaaatgtgggctggcacctgttagggccaggaacagacttagtaattgatagctattggagaaatgagtgagtaggtaggcccaggttgactgggcagctctgggacagaccctattgaccagtgcctgggaccccgcctcactctcagcacagcctggcccaccagtgcaggatgtggattccaagggactgatcaagactcagctctgctacaaagctctgcttttccctccaactcatggactgttgtaggggctgagactcccccgtgggactcctcctgcccacgcacccctgtcccagccttagctttgctgcagaccattctagatactgactgcagatcctgcctcataaacaggcagaaatgtcactgggagagacagtgaggtcaactagatattggatagaaagggcagctagaggctacacagcaaggacagttagagctgggacagagatcagcaaggtggcatgtgagccggccagtgagattggacagggaggttggctggagtaaggccttaaggcctttaggccagtgagaggaagacaattgtcagtatggagaaagtagactcagtggagacccatccaggcctgcagtgacccctctgctttggaagggaagctctggccactctgccctgccactagagctgatgctgcatgaagccacatagaccccaggaccctgcttagtggctggagaacttcagtgttcatcgtgactgtgctttccagcagatgggctggatgtgattctctgaggacaccttcaactcacgcatttttttttcttttttcttttttttgagacagagctttgttgttgttgcccaggctggagtgcaatggcgtgatcttggctcactgcaacctctgcctcctgggttcaagtgattctcctgcctcagcctcccatgtagctgggattacaggtgcctgccaccacacccggctaatttttttgtatttttggtagagacggggtttcaccacattggccaggctgttctcaaactcctgacctcaggtgatctaggtgatccacccatctcagcctcccaaagtgctgggattacaggtgtgagccaccatgcccagccaactcatgcatattctgtaggccaactcccctaagcctaggtctgtctgtggtggcagggagggtttagagagaaatggaggttgggccttcccccatccagtaggctggtaggggatttgggtgcatgtgtccccgatctccttgccacagaccagatatggaaggctatgacctgtggaaccaacttttctaggtcattctgaagtgtcctgtctcctctgtctcctgcttctgctccctggacagttccatgacctctcacagagacatgcctggcaccttggcttcatgaagatactgtgtggcccaaacgaataccagtttcctttagccccagaggctgacaagacatatctcccttggatttcaggagatctgtggagcatccaccaacccacctgttggttcaaaatcaactccaaagtggttttgtcctagatgtcctctcaggctcaacggccacatgtgtgcttgagatcttgctgtgctatttctcctggtagtgggagtctgagtggcatccatgctccacagggcacaaggtctgtgctgtggttaataggcagctcctggtgaccatggggtgtcagagaagcagtgttctggctgctgaaagtcagccaaaaaaaaaaaaaaaggatagaagcctgaccttggcatggagccttggttgaagaaggagccccagccctggaagctagtgatcccgcacatggggctctgggctgcccttatccccacctcccactcgagggcacttgtggcagcaggagtgtgggcaccaggcagaggacacacgtgccctccattattgaaagtcctctctgtgcactgcagggtcttcttgtgtaccagcacttttttcttcccatttctttctccatgtttaccatcaacactgtgagaataactgaagtttccttatccaaaaaaagggtgctactccagattccgccactactgttttcgaaaagcacaaaaccaacagagcctcagagggggctgaccctctttctggatcccacctccatccccccgaacttacgtagtgctttcctcagcagccaccgaggcctccagttccgtctccaaagatgatgggttccttccagtgggtgcaaagtgagagccccagtgattggtgttcatagtgggtcagtgtgaacaacgcccaatggcctgcctgggccagctggggcctcgttttgctttggtctgaaagacatttttgttttctggtgagaacagccccagcctggccaggagccggccagcggcaggaatacaaaccctttcatgtgacagacccaagtggagtgatgccctcctgccagcagcaggccctcccctgccgctcctgggaggcggccatttgcatatttcccattcatcctggccttgaaaaggaggcctgagttcccagtgctcctgcccgctgagggctgggccgctccagtctaatgttaactctgtggacactgtaggctctcacaggccaacagcagaacttgaccgcttgctgccggagggagagcagcttaaggctgcagctgctgtgccgcctgacctccagaggggggattcaggaggtggcagattcccgttgaccagcacagccttttgctaaactggaggaaattcagatttgtttcttcttgaggcattcagaagaggaattttgtcagactatggggatgccagaatattcagctatttaccaaatttgccagaaaatgtgcccttaaccaagggcaaaactctttttgtcttgctcactttctagtctacaaaaaaattcagtgactctggaatggtaggtgaaggagccatgccggatcctggctgcagcagcaatccctttgccaaggatgtaggagcacagcttgcctggggcacttttgcatccccagggctgagtgccattagcttgtgggctgtgactctgaaggcatgaggcagatatacagtacccatcaccatctttttcctttctcccatagctaagtgccatcctgccagcctcagcttcctgccccagtcctcagtgcagacaggcctctgcctccttcccgccactgtgtgagggctcctgccaggggccccaacatcttacaggctcttcctgtgacttaccaacccacttctgtccctcttcgatagccctgttctctaccctttcccacccagctcggatcctctccttgttctccctccctggctaaggatgtctcaggttctgtcttttgtgcatttctcccctagcacgtgtccccaggagaccagcagggctcctaagtgaacaagcaggcaagcaaatccctctgttgctccccccacctcagtgacccccaaccatatattggcaggaccctccctacttcaaggagcttccctctagctggaggaggtcgcatcccatcctgcttgtaccccagccacctgcagttgagctctgagtgcatggcctcgccatgagcagcccatatgccctttactggttcaagcttagtttgcagtgtgtcctaagtttgagccagtggcagaaatgaatcattgctcctgaggccgggacaccagcagtcctaacgtggacatggccggaaaggcaaaggatcgtgttacagccacaggatttggcttcctgcacaggagggcctggccagggagtgtccctgtgcctgtgaggtgatggtgaccctggtcagtattcctagggtcctgcctgctgtcccagggcttggcgtggaaggatctgaactcgtccacaccatcagtcctggttatcataccctgtaaatatttccaaagggactactgctgtttttttagcccctgctgtccctctttgctctgagaactttgtcctgcctaattcatggtgagggcaacgtttatctcagagcgtgtgaaagacactgtgtatctgtttgctcctctgttctcaaggctattcatattttaaagttcctgaaagcattgtttgtgcctggcttcctggtgctagcatcaggaatgtggacccacattccctgagcagggcttagggtgagtgagatttttgagaggtactgtcatgaggatggggaggccagcgggcagtggaggctgctaaagggaggcatgctcacagtgagcttgggctagttgcaacaggtggctctgtaaagtactcagtcacagccagccttagctgggcctttctacattcaaggggcttaattgaaccatcagagctatgatcaggctccttggggaagcttggcaggtgagccaccatgtaacctggcaaccccgtatcgtatcctgggcctctatctcatgggggatgtacagtgggtcccacctggcaattcccaagtcagggaggctctttgctccatttctgccctggtcttatgtggttctgtgaatctaattaaaacccaagaggaaaatggagagcaaacccttctctcacagcagagagaagcttgaatccctgtgtggagagggcaggtgttgggcaagtgtgcgctgctgtgtttgcacctctgcaggtcagggttgtacatgtgtgatggtgaaggctgtgcatttctcaacctggcaactgggctgcacactgcttggggtgaaactactccctcagctctatgcctctggcactctgtgggatttcccacagaccactggatttcctgccccagaggctgccttgagaagcattaaaggaagctttcatattaaaagcatctctgaagatatttggagaaaagtaagggtcctgcctagaagaaaggtgaagtgactttgtgggctgatcgggggtgctcagatattcgttcattttaatcggggtgggttgggggaagctagggccaagttccagatgagggtcgctgaggcaggacgctcttctcatggctcacccagatggtagggtgagtagtggaagctgttatctgctccagggaaggtgttgcaagcctgtgggctctagacttgccaggcaattgggcaaacagctttcaagagggagctcagagcactgggtcctgtcctgggacattcttgcagcaagggagcagggttaaatttgggtggacagtggcccagtgcaggcagactcgtaattgcccagaagcacctgatgtgggtagggcctgggggtggtagtaagctggctcctgtggcctagacttgtcttttacttattagcaggtgccaccatgagtctagctgtctaccttatgatcagaatgagtgtccaattcaaaatacgcagtgatcatacttgtgtgctcagccacatgttagccatggaaatagtagtgaaaatgctatggaagtagccacccacacccctaagcctcacagatcttgcagtagtgagacccccgagagcccctgggacctcagtctctcagtctggcagaggtgctgcaggacttcagagctcagcttcggtcctaataggcaagggtgtgggttctggctccagggtgaccattcccatgcaaactaggcaacagtatctcttagtgcaggcatgagagcagggctggtgtgctgccctggggtcttgtggtggagatcagccactatcttccacctgctggctctgatccttggtccagagtgtcctcactccccagagcatccctaagcagatgttttatctggaactgtgccatttctttcctcttcccaagtagattggctgtgaccttgtgggggtggggagcagaggcagcccctgggagaggctggaggcagaatctcccgggtagatggtacagtcgccctcagtgccagagagctagcatccccatcccctactccccactacttcctgtcaccccccaccccctacacacataaactcatgctcactgcagtcccaagcccacagcaaaggcctggccctaatcattgtctcaaatggatgtgtaaggagactttgttcttaagaaacccacttggcaaactccctttcagaactgcaaacagggtggggtgaggggaaaagcaggggggtgtaagctgaggctctggcacgctggcagggtgagggttaaggctgggttgcttggctctgagctgatctgagccagcaccgccctgcatgcagatggaggtggggctggcgggggccttgaggggccagcaactccttacagaactgctgtgtgccctgttccctgccagacctgctcccacagccaccagggagcctgtgctaccactgctaacggctctaccaccacccggcttctcagagcaggcggctgttgccatcgactgtccccaggagggcagactcggggcagggccttcgccacttttgtgctttgatcaagatgtggtaacttctttccctgggccccacaggccctataaagggaggctggttctagtgggacgagctcagccgcctcctcagtgccaggagcctgctggaaaggtagggtgtgaatgcatctacttgtgcaagttgtctttgagcccctttggcttgcaaagagatggagtaactgcttcagctacttgctatctactaagtgtttcccttactacatgcctggcactgcactctctgtccatgagcttgtttgagatgaggcccagaggggcaaagtgacctgcccaaggccacacagctatcaagagactgagtcatgatttggacccaggtcagttcagcaccggaatacccagaatacccactttgggtcctctcccaagctcgtttgctagggtccctgggccctgggagaggttgtagttttcttttcagagctcttcacttggagttgaggagattctttgatgatttggtggctgggcttgagcttccccacccgttttgaagacctcagaagtttgcagaggcccagaactccatcatatgaacccctattagagaggctgatacagaggaagctggagtgattcaaaggggagggaagaatccgaggatcatggagagcctcagtgtgagcattagtttggactctggtcctaaggcaataggaagccagataaggtttctgagcagtggcatgacatgatcctatctacatatcaggaaataactttggtaacagggcaagcacctgttagagcaaggagacctatggagagggtggtatgggagtctgggctgtggttggtggtggctgtcaggcctggggccgttggggtagagaggagtggtcgggtatccagctagacaatgaagcctagagtattgaggttaggaggctggaccagcagagagttcttggagccatgtcagggtccccagggccagttccacagtgactgtgctctggggctttgcttctgccaccccaccacattggagccaacatatttcccaccagggcccctttcttcctgttctctcccatgctggattgccctaaatcagcagaggccatgctgaggtgggaggaagttccagtttccttagccttagctaccacttggtattctgaactggtctgtgctggagaaaaagatgtcggatattccaggaagagaggaggaggtggctagttcatgttaggtggcttgttcatgcctgagtcctcctgccaggtgaatatttacaaacacagtcactcacctggcaacaccagcaccactgattcccttgagtgctgtccacactcctcttgcccccgacacacacacaatgcacatctctgctgcagccaagagagtctcttggggtatggaaggaggcagtatggctgggaccctagagaccaccaagccctaccccaggtcaaaagagaggtgtggaggtcagaggaggccaaggccctgtgaaataatgagatgagaccagactccaaggcctaggctctgccctccccatgtcaaaggcttggtggcttgggctggctctgaggcccatgtcctcaggggacctggactcacagctctgccttgcagtggctcccaggtctgaagggaacctcagtgtaaacgcaagcagttctgactgagaaggtcgataagcctgaaagaacgagaccctctggttgctgcccagccaaggtggggtacaggcccagcctcaaggtcagaggagctgccactgctgcaaatacctccttcagggtgagcacctaagtagaagttgcaaggaggagtgggcagccaagccctttgcgcactgccttccatcaccccaggtaggaggagaaggactcagccaggagaagatggtgagttcttgatgtaaggccaggaagaagcccacccatgtccatggcgaaagatagcaaatgactggcccaactggctggtcccctcatacaggctctggtggccctgcacttcccccagcccctgaacctgggcctgggctcttccaggcagctggagctggttgtctgtgggttcagtgccaatgcgaaggaaaggatggattgtgggagtgggcccaatgttggcaggggttggggtggccataccacatgaggggctggcattgagactgcagtcttgggcttgagtctatgctctactacttgtttactgtgtgcctcgcttgctgaacaaggtggcttctccagtggagcctctgttctcccaccttagagggagtacctgcagctgttgtgagggtcaaacagtacagtgtgtaggaaaaggctgcccaggcatcaggaactcaggaattttaggccaagtccccttcttcctcccactgaggaccatggtaataccgtgactgctgaaagctcagcatatccaagaggccagcctcacagacttgtagcactgatctttgtatgagattttgtgggctcagtgctttattttctgcacagaatattctgttccctaagtgtcccatgtgctctttcaactccagcctttgtatgtttactttcctctgccaggccaccctttcatctttatctttcattctcaggatcaatatcacttcctgccagaagcctgccctgactctctcgtacctaagtcaggcagcttttctggctccccatgtctgatcataacactgcccatttcctcatgtgtccttcccaggggaccgagggcaggcccaactctgagctagatgagaagagggactgtgtgagggtctgccagatgcgttgaaagacagatggatgacttggctaatctgggctgtgctctgtaaaaactctagcattgcaccgaatgccacaatatgcaaagctcagagtctgtgagcatctgccaaggaccagggactggtggtaatgaggtatccttccagggttccctttaaaacttttggggtatacagctgagccctcgtgctaggcatgagtttcttggtccttggcttctcatatcattaagtcagttcagctccttcaagaaaaatgtccatcagctcagaacccaccctacgagttggtgagcatgtctggattttctactaagtagtgagtcatttatctgataggcctggctgtgatttcatcttcccatctatagcttaaggaagtaaatgtcccaagaaggccagctagtcacctacccagagtcttctccagagtgattttccctggtgaatctactgtggtctataacttggcctctgctttattatgcagaagctgaattggatggatatgctaggagtgggttgttcctccaggatggtctcataactgacccagctcaaggaagcttctgttaaaactggatttccagctcaggagctcagtgaaaataccacacttggctagaggctcacccagagcctgtgggtggctgatgagtgttcccaggactcagcctgctgtgccatctgcagggcataaactccttctgtggggccacagtgtgcaggccaaatcacctctgcccagtgcttgtaccaggcctgctcctgaccccttttcatgtgtcctgggctgagcagtcctcttggtttgacaagcatatactttaaccatctctttagtcctctgaatatgccagatgcagtgcaaggggctttatatgtctaaatggtactgccctcattttaaagatggggaagtggaggttcagagaagaaggataggctcaaccttgcattgctcataagagaaggagaaggaattacaactgaagggctttttgtgtgtctctgcaatgactttgcacatcactgacttcatctccggtgtcatgatgttatggtttaacacaaatgccatttattgggatttcagcagatctcccctctctcaggggtcaagcaattttttggctcatatcccatggctgcagagtagccactgttgcattctccttgtttcccttcttggaagcacagccatgcttccaaaggcttagggcctgtgaggagggtgcctcggggtggtacagggcagccttgagcccaccctgccatcactgggctggcagacctgtaggtgcctctagcctcaagtcctactaggcagtgacatgagggggtcccattggggatgccagcacccatcacctggcccacccttgatactttcctcagttccaagcaaggtacagaacccttgagccaagctggctgtgtatttgctgtgccaacacggcctcacttagtggccgagaggaggatgccgcaggcccctggggcctgcttctctttcagccattctccagtgcttctcacagagaccttccctctctctaccccagggcatctgccatgtctccctgatgggcccactgtacccacttgggctgtagtgggtgagggtggctccctggctgccatctgtgacatggcaggagatgttggtcccccggggagcgcacacagcactccgctgagccatttctctctgagtcgtggtttctcttcctaccaggttaacacctgctctcctctgccacctgccttgcctctgaacacttgctgaagggatcagggaggatagcacagggcccagttatggtggggccagttgtcctcttggtagtcggtgagggacagtgcagagccatagtgctcatacagtcagataggtcttcaccttcacatcatgagggctggagtatctgtcagggctgatctgcggtctttgccctgcccccacttcgctctcactcagggtcagggcctggagttgggagattagaggtagagagggaggagcctgcattccttcacccctgggcactgtgctgagcacttctgctgcccttccctcttctccacaccccaggagcaaagataagtaaaatgctatgacagctgtcacacaggagaacagagcacccaggccttgaggtccaggaagcatcattcccagagctgccagagcagtggccctggaaaatatggaagcagctgtcagccatggcccagggcctgagcgtatgattctcaggaaaagtgggcaggacatctgactgtcaggtgtgacggcagaaggttctggcctcttcctgggaaaagcccttctaggtagccagcttctggggtgcactctgtacatcccaactccccgagggcctgccctacagtgtttcagaccagatatcaggtcctgtgacccaggacccctccctaacctgcccgtcaggtctcttgccttatctgactcttgttttcaacagagtttgtcctctcacttctggagaagatgcagacacaggagatcctgaggatactgcgactgcctgagctaggtgacttgggacagtttttccgcagcctctcggccaccaccctcgtgagtatgggtgccctggctgccatccttgcctactggttcactcaccggccaaaggccttgcagccgccatgcaacctcctgatgcagtcagaagaagtagaggtgagcaggataggagacgttccactgcggaaagtagggggcagaggacaggcatcttggaagtagaagccagacttgtggcttatttgacctcacatggcccagagaaggtgtctcccctggcagtcagccacttagctctgcagcagccttgggcagggtctcctaccaggcactccttctgcctctcccaggaactgcctctgggtagagcctgacctgggccttgcactgggcctctagtttgcctgcttctcgggtaggagggccttggctcattggtattgcagtaggaagcctaagcaggttcttgaggagcttcctggtagattccctcccaaactctcctggtctggtgctgggacccaggattcagcccactcctggccctgctctccctgagtacatggactcacacatggtgccaccaaggggaagacgatacaagggccagtggacaagggtgttctaggctaagcctggaaggactggtgaggtgtgtttcattattaagcttatggaatttatttttgccttttaaaaatttgctttttctcctcttgaattctgttcatttggaatagataatgtatccacatagtccagaacaaacaaatggaatgtactgaaaagcttgtgtcttcttccttgctctcccagttctcttcccctgatgcaacctgctaatgctctgtcctggccgtgagcagatgtgtagagatactcaccacgctttcactcatatccaccacataccctgttgtgcaccttgccttttgctcttgacagtgcaccttggcgatcataagcatgttttgccttgtaggggagggtgcaggttgaggtaggggctgggatcttcagggcatttttccagcggaagaatggtatgtgcaaaggtgcaggtgtgtgctgaggcacatgggggctttgcgtgggacgctaggtagtggagaggggccagagatgggctggccaagtgctgttgagaatggcctttggtgtctggcagtcctgggtttgaagcctggctgtgcctctgaggtgtatggccctgggcagtttcttaactctctgagcctcagggctctcagttgtaaagtgtgtaataaaaagagcacctgctttctaaggtgtggtaaagattgggtgtgatgacccagagaagtcactaaggacagctgtttttggttaagcttgtgactatatcacatctggagaggtcagcaaggacagagccctgtgaactgtgcagggaccagcagagggaacagcgtggagctatttgagattttcagtagggagagacatggccagtttgtgccgtagaaaggtgggtgtgacaggggcaagcgtaagaaagcagctgcaggcatctgggttgaaggtgacagtggtctggatggtgtcagaatggtgagagggatgaccctggctcgtgtgtaggggccactgagtgagtcaccttgtgggtctggaagacaggacatgggatgaagctaatgcctcccttcctggaatgactgcatcctcccttgcctcatcccccaggagcccagaaagccagagtggctgcaccggagtaggcaaaggagacagtggtaggaaatgagatgggagaggcaagaggggcccagatcagacagggcctggcagcattgactgtgcctgctgtgtggtgggaaataattcagatcttgtcactcgcctggcctaaaaccctttcctggctccccattaccctcaacctcaagtccagattctgccttgatctgcagcctctctggcctcctccccaaccattgcgatctggagctccatgaatcgcctacagttccccaaatgcacctgtgcctcctgccggtgcatttgcatgtggtgctgcctatgcagggttgctattccctcctcctcactctgtccggcaacccccatccatccttcgaagcccagcttggcagctgatcgataacacacatgcccagtgttgagcctcttctgtccctggcatacagtctctccttgtaccatatctgttgcccaagtgcaactgggtctgattggatgtgtcccagcttctcttgcaggtcttaggtgggcttggtccttgaaagcactggccaatcagaactttccactcgaaaacagtcgggagctgcctgtggttttgagttcggctgtttgctttctggttctcacagatgtttttttccttagacctgctgttccaagaggtggcaggctctggcccagcccagggtagctcaaatagtgcttgaagaagaggtggagctgtgatactggagagtttgggtttgggcaccctggggaagggtgacagggtagaaggggaggaggcaggagaaggctggctcctcaccctactcaccagcacagaggggtttgccaccttcccactctgcacccgtgccactttgggcccaggaacttgctgcctgcctctcctcccccattgcacatgaacataattcagcctgtcctccctccctagcctcctaggcttctgtgcctgggacagaaccttcagcacagtcctctaactcacttcattatgtgaatgatgggtggcagccttcttagctaacaccacacccaactgatccttaactcaggggcatagcagtagatgatgggatgggagataccttggcaggttgttcctgaatccagccaatactccccactgtgttgtatgaatgagacatgggtgtgtacgaacattaactgaaaactctggacattctgcatatgctgacctgctgtgtgaatgctgtatgtgtgtgtggagtttgtatgtggggacactggtatacccggcctttatgcatgagccaactatgtcggagtgtggctacatgcaggttgagtgtatacagtccaggtgtgtgtagtccatgtgtacgcgggcacacagatgccacggtgctaactgcatgcacgggttgtacatccgagctgggtacagccttgtgcatgctgcggccctctcctggcacccctacctgcctcagccaacttctctggccggtgcttggcttgtaggacagtggcggggcacggcgatctgtgattgggtctggccctcagctacttacccactactatgatgatgcccggaccatgtaccaggtgttccgccgtgggcttagcatctcaggtgagaagggttgtgggggggggtgtggaggggctgtgtggcaggggtggagtgggtgcaagggtgggtatgcaagcatgataccagggccatggcaggtgagctatccccaggttcagtggagagaagctactcctggcctttctcccaccagtcagagaagcagctgcattatatggctaaagggctgacctcagctttgttccagcccttggggcagcttgaccttaggccatcacttggcccacactctatactcttggggagccttgaactgccaggccactggctggcatggttctgaacctgaacctctgagatgtctgggtgctctcagggtaagaggcaaagagaggcagcctaccacctcctcccagtggtccccaggtgtctgtatcctttgggtctgtaatagggatcaccacacaaattatgatggggactaggcactgcatcattccccatttccagacctccctgatccctgggatgatgccatacttatgtgctttaggccctcttgggcttcagcagattagacaggtagctggcagtgcaggagggcagttcacttggcccatggacacactacagtatgggatgtccatccaggtttctgatgggcggatgcaggtggcacacccactctgacccctctctgacacaaggctttcttatctctctacagggaatgggccctgtcttggtttcaggaagcctaagcagccttaccagtggctgtcctaccaggaggtgagtgatacaggacaggccccaccctggccacccattcagatctggcactcagggcaggtagggagggatgtgggcacctgctgggtctcagagggtcatttatttccctggcctgtctgccaaactcctggcaacagccttgaagggcttccagcatacccgggttggaagtcagggaggtccctcagatctataagaatcccggctgggcgtggtggctcatgcctgtaatcccagcactttgggaggccaaggcgggtggattgcctgagcacaggagtttgagaccagcctgggcaacgcagtgaaactccgtctctactaaaatacaaaaaattagccaggtgtggtggcatgcacctgtaatcccagctactcgggaggctgacaggagaattgcttgaacctgggaggcagaggttgcagtgagcagagattgtgccattgcactccagcctgggtgatagatcgagactccatctcaaaaaaaaaaaaaaaaaaaaaaaaaaaaaagaattcctcctggggatctccttcccctgttgaagagtccttgttttcccatcacttccccacatctgtgtgcaggtggccgacagggctgaatttctggggtccggacttctccagcacaattgtaaagcatgcactgatcagtttattggtgtttttgcacaaaatcggccagaggtgagcatctaccttgactggttttagagggattcgtggggtaggggttggctgccatggaatagtcctgctttcactgtttgtagggcccaggacaaaagaaaaaacagagacccttgggctatgccaccactcctcttcccaccctggctctgcccctcatcagcactggccaccccagccatgctccatccacaccccacccagctctacaaacagctgccccttgagccaatggggaggaaagacctgaggaacaggctcatgcaggccatggaactgtccttggggcagtttagacatgaaatccaggagttacagaattctctggtacaggcctggtccagaaggctgtgggtgagcagacacaacccattaacctcatggattccttgccacaggcatagggcttagagcagggacgctggttacctaggcctaagggcaggacagccctctaatctccccttcttccccacccccgcctcatgtgtctccacagtggatcattgtggagctggcctgctacacatattccatggtggtggtcccgctctatgacaccctgggccctggggctatccgctacatcatcaatacaggtaagcccactgccaccccaccctgccactggcaactggtccccagcctccagcctccagcttctcaggttatgctgattgtctgacactcgtaagaggcactttgctctcagaaaatactaggggcttacactgtggctcctgagttggcttcctgagtcaagctgtccctggtcagacttcacacgaaggttccttccacagggctcagctgccaagaaggagcctctgcaacagcctccacacagggtacagccctctgaagttcatgacagcttggcacagatgcagggggtggtaaatatctcaaacagacctgggatgatgggggcagagcctggaacaaaggggagcttggactctgcttgaggaggttccatggccttctgcccttggttccgcccaggacccacggcaaattcctctgtacacgaggcctgtcttatgtatttatttacacataagctatgggcacacagaccatggaagtgctgcctggcatgtgctgcctggcacatgctgcctgcactcatgacctgggcccacatggcctgactctccttgatggccccctgcagcggacatcagcaccgtgattgtggacaaacctcagaaggctgtgcttctgctagagcatgtggagaggaaggagactccaggcctcaagctgatcatcctcatggacccattcgaagaagccctgaaagagagagggcagaagtgcggggtggtcattaagtccatgcaggccgtggaggtgagggtctgcttctgggcggtttgctgggctactgctggctggtcaccaagtcagaacttctggttatctgtccctctcatgccctggggtggctgttttgggcccgcagggtatatcagtgtccagacagggcaggctttgcaagggctggtggtgagtggtggggttggtgcccacaggcatcctctaggagataggctccgtggctggatcagttaatccagcctggcactaggtgctgactggtggaccgtggtgccagcttacctcagaggtactcacacagcctctggagcttcctcatttccagctagcctcagcctgtctgtgtctgaggactacagacataggtccaggagtctgggagaggttcttacaaatgtgatccagacccccagcggccagcagaatggatgtttctgtgcctggcctccccagagacatcaggttggtggcagttggtggtctgctggggtgacacaggacatcctggcctccaaggcctcaggccctgcccagtagcagctgaccccccactatgccctactggatctaggccccaggccctccttctcctgcctccctatgtgctccccactctactggtaatgcctatgcattgtacccctccctggcactggcagctgacctacactggcagcccccacctgccccactagcactgactgctcatccagaagcctagtccacccagctgctgcatcctgagcatgtgcccagccgtgccaagagcactttaaacccaacatgctcacactcggattgccatcatacaggtggcatgtgcactttgcttagcctctccctggggctcagactccctgtctgtaatgtgtggggtggcctagaacctctagtcaccctccctgtctcccaggagcctcaggcttagatgtctgtctgagaagaggccactgaggtcatgtctgccatgaccatctcagtggctgctttggaatcttaaactctgggattggtgcaggagtaaggcctactgagctgtttattctgattttgtgtgtggtgtgtgtgtgtgtgtgtgagtgtgtgggtatgtgtgtgtgtgtatgtgtatgtgcgtgtgtgagagaaagagacagagacagagggacagaaagagagagagagagaacttttgagcatttaaaaacagcattttcttctttcaggactgtggccaagagaatcaccaggctcctgtggtaagcgaattcacctgcaggtctttattgagcgagatggcgtgcagggcctgtcctcacagagtccctcactgtgcacagaacagcacctctgtgttaataagcaactcctgtgtgcaagccaggaaatgcccacttgagtgtccaggacttctgtgggccgagggcccagggaaggacctggaacaggagtcaggtatttgggagggagaaaaaagagctgccaatcctggccacccttggttcttcaagtaacttctttgggaagtcttactttctcactatgaatatggcaaactctccagaagatgcagtagacagaagcaacagcagaaccagaaatggactcttgtgccaaatggccttgtggcatctgctgtctttgttcatctttgctttgtgaactgttctgtgcgtcatccccatgtgatacttcctggggttgagccacagtgagggcagctgcccccgggatgggccatgtggggattttcaactttctaaaaggcatatggcctccaggcctccctccagctcagtccttccctctcccttcacacaggcctgagcaggtcacccccggcttcccagggcactgcatgggtagctcctggtgtttgcccatctcctacacatcacggctcagttttagagaaccactctcccatccctcagcaccctttctctcttctgcctctgtgcctgtgcccaggctggttcctctccccaaaacacccacccacacttcatcgggagaaatcttgcttgcgcttccatctcaactcaactgtcacctcctctgggaagccatcctctacatgcaagcagacttggtgggctccttctggtgaccccagactatgtgcccagtgccagggcaagggctgatgcagagcagccttggtgacacagtgggcagctcagtgcccaagccacacgtgctcccaagcttaacctcagatacttgggagaacatgggaaggagggagggaactgggtcacatccactagaaaggtcagagctttgatagagactgagatgtggccactgcagcccaatcccacctaggataattcagcccaggctcaagtaggggaggcagtgggaccagatgtgaggttggtgggacagattagtgttcacaccccagttaggtttcctcagcttctttttctttttcctgagcgctcatctgcccacctttctgagcgcagcacacaggagcatgcaggcgtgcccaacacatgctcacacccacatacagcatacatatgggcctggctggttggggagcccaggcatcttgggccctggctggccacactgggtctccctaacacactcctcttctcacccctgcagcccccgcagcctgatgacctctccattgtgtgtttcacaagcggcacgacaggtaagcagaggcacgcagatccccagccatggctacctgcacccttccctggtggcctagcaggtgactgctggagtctttgataccctgtttgaaatgggctgagccttgtcttgttcctggctccagacactgggtgacctcctgcacctcccagtgccctgcataagagtggccagatgcagatggatagtgtgcattgggaggtccagtgtgagggcttggcacctcccagagctgagtcagcagagtcatgggcagctggatcatgtgctgagggaaggtcctttctcactggcatcatttctctctggtaaacagctctcactcccctgctttctgcccctgcctggcctttgtgttggagactggggaaagagtgtgaggtttggcgtctgagagccttggtttgagtcctacctccactgcttgctgggggactgtgagccactcatttaacttctctgccaccagtgtccccagtttctcatctgccatgagggtggctaaaggtgccaagtgggagatgggacagtgtgtgaaagggcaatgcagatgctctgcaggctggggctggtgtgccatgagcaaggctgtcaggcaaagcacacaagcagaaatgatatcctctgtgcttggagctgacagaggagcacacacatcaacagtggcaggaataatcaaggaaggcttcctgggggaggcagaaagcacaagaggacacacacagcacaggcacaaccctctgcatttctatagcatgctgtccaccctctctctgcaccactggggcctcagcacagcctgtgaggtgagcaggattgtcaccaagcctgcttgctccaaagggacaccatcagcaagtagaagcaccagggcctgtgccctgctgtcataattcccaggccagagcctttcccagtgctgcctttccatctcatctgatgacgtggatgtcacttgtcttgccctgaatgggcaggaagtctccagccttctttttccaaactgaggattggcccatcttgatgacagctctcagtgggcagtgaactggggctctgcatgccttctgcagatgcagcctctaaggcatttgacagacctgtgaccagccctacaaccaggattattcatgtcagtggatcatgataaacatgctttattgaatatagatagatttttaccattaactcacatgggttcaaggatttccaccatattctactaaactttgtcagaaaaataacaacacagcccttcctctccaggagctgacatccagagccaacccagaattcaaaaatgcccttcaggtttatgttgctttttaaagagcactttccaatgtctttttgtcttgagttttacaatgtgaatttttggtgacatggttttggggagcaggtcactgctatggccttacctttggacctgccttcaaagtgtgccttcagccttttaacaggtcacttggtcacagacattgcccttggatctggagaaaaacttcatgatgcagaaatgtgctattgcctggctggggagggcagacatcatgtccagtgcttttccagactgtaggaagctgagccatcctgctcaagctctgtgtggtggaagcagaatgtatagggcttgaaacataggctgtgatttactatcccagacctcccactccaaagctatggctgttgcctgggcagagctgggggagtgagcagggctctggcctgatatcaccccatctggctgtgcacttggatttccttggctttaggctaagcccatgctgtgcctcttgtactcatcctcttgtcgggcacatcagccttgtgtgtcctcagcgtcacagcccagatacagcttcccttaaatgtaagctaaatgtcctggctcccagcctcatcaagggccacattgttcttttcatggggaaagatggaaaatatgatctgaacctgacatttggcccatgattctggtggaatcattccaggaagatttcattcttagcatgtggtggaaaaaatctgtggagattcctagaataagtcagtactttgaagtccctattcaggccaagaaggcctgggaggtggtgagagcttgtggtctgtctgtacccagtgatggctgaggggtgggcatgtggtttgctgttcatttcaaaataacagttagctggactggaatctgaacccattcccacctctgaaaaaaagataatatgtgggtgtaacatagcccagtttgggaaattgggtctcttgaatgatagttaggatgttttatccttgtgagttcatatgccttgtcttcccagcaaagaaaatacagtgcttttaaaaaacataactttcagtctatgtgtttttagcactctttttctaattcatctatattcactcattcagctcatttttgtgagtacccactatgcatcagacctagcattaggtgctgagggcatagggatggagaagacataggtctgcacccgtgagctcccagcttgtgtcatcaggcagttacaatatgatgcggtcactgccttgaggtctgcatccctggtgcatgggttacccggccactgagagatcagtacagcaggacagaaaggattcccagaggaagtcagtctaagcagagtcctgaaagatctgtagctgcagaagccagggaaaggcattccctgcaggagaaagagcatatgtggaggcctgatggtagcacagaacacgctgctttgagggagttttgagaggaaaagagagggcccgaggcagggcttgagggcacgagcatgagggagatgatgggacaggagttcccaatagaggtcaggcaggaggggctggagaggctagaggagaacaggatttgtcagtgtcgtctgtggttaagttgtaactggaggatgtcaccatgaaatgacctgctggtgctcttgacaaagactggtcccgggcgcggtggctcacgcctgtaatcccagcactttgggaggccgaggcgggcggatcacgaggtcaggagatcgagaccatcccggctaaaacggtgaaaccccgtctctactaaaaatacaaaaaattagccgggcgtagtggcgggcgcctgtagtcccagctacttgggaggctgaggcaggagaatggcgtgaacccgggaggcagagcttgcagtgagccgagatcccgccactgcactccagcctgggcgacagagcgagactccgtctcaaaaaaaaaaaaaaaaaaaaaaaaagactggtcttcccagcactttgggaggccgaggtgggtagatcacaaggtcaggagatcgagcccatcctggctaacatggtgaaaccctgtctgtactaaaaatacaaacaattagctgagtgtggtggcgcatgcctgtagtcctagctacttgggagcagaggcaggagaatcgcttgaacctgggaggcagaggttgcagtgagccgaaattgtgccacttcactccagtctgggcaacagagcgagactccatcacaaaaaaaaagaaaaaaaggctggtcctggggcgtggggtggaggagctggtgctgtggactgaggagcaaatgggaagtaaagatattgattcagtacaagcatgtgtgcacttctttcacgaagcttggccatgccatcaaaaggcatgctccatcatgttcatagcaacactgtttgtaatagtcaaaatctggaaataattcaaatgcttatttgcttacagtagaacattatgccacaatgttgagcaaaagaaaccaggcacaaaagattgtatgatttctttcatataaaattataaaacgtgattaattaccctgtggttttacaaatcagggtagagggtgtcttctgggataatggcaccctggaagggtgataagggagcctctgggatgctggttgatgttctatgtcttgatctgggtgctggttgtacagccaagttcactttggaaaactccattgagctttacacttatttgggcacttttccatgtgtgtgttatacttgaggagaaagttgtgtttttttttttttttttttttttaatagttgactatgaaggtatggcagggagcaagattagcagctggtggagccaagggctttgggggaggtttgttgctcttctggagatcctgaaagtgtttcttatagctgagaaggggccactggagacagaagaaaggaagaggatgctcaagcaccaaagcccccgaagctttggtgtgggtgggggagaaaggaggtctccaagtaccagggaggagatggccctgctaggaaggaaggggtaagagaagagtctgggaggccaggaagatgcggggagtcctctgacggcttctgcctcctttgtggagtgggagtcagagtcctggctgaggatgagaggagtctaaagggggcatgtgttgacagtttctgggaagagagcccctctgggacagagactgtgagcctcgggggctgcgctgtggagggagcaggaaggttggcaactggattggcttggtggggttttcagaatgggatccttggggaggcccaagaggtgaggcacttgacaggagagtgactgaagggagggacacaggagtcagcatgggagggaggcagggatgagaaagaagataggaggggaagggccacaggtctggagtcatatgaaagtgtctcaaaacatgagagatcaattctaagcactggctgtggggctgggaggctgagggggtggagaccattcaaattggggcgtcccttctgttctaactgaggatgcccatgaaagcccaggcatatacagtcatttagctgagcatgtaagtgcccatcatccccagaactgtggctactcagaggtgggctttctggggaaaatgttcaccatgacctattcgttttgtgctatttggttcaagacctgaatgaatgtagcaggagtgctgagttaccatgtatgaagtgcccagcacagtgccaacattagtgggtgttgagtacttggctactattatagttattatttctattcttactagccctcaagtctgattttttaaaaattggtggatatgggattgataaaagtaagactcagacctaaagatttgagagcctttagcaggaagacgaacactctagctgcattatgaaacttccagagaatgtcagtcaccggtaactattataacccacctttgagtatttaaaagcagaaacaagcagccagaatcccccagctgggtggcccagaactgtccccaaacccacttccacccctgcaggagaaaccttgagctcaagtccatccgcagctgctgtcacctggagccaacatccaatcagggcagatcgtcacccagcaaaatgcctttctacataatagccatgggaggcctgcccaggaacactgaccaaagccaaaatgtcattggcagaatctaacacttggagagtttttcttcagtggctagagagaaaattaaatacaagaatggtcagcttatgagtggatgatgggaaatagacagtgggtctcataccgctgagacattggcggcctgggtagccagcatctcttactgacattgcaccagaaaaggagaaaaccagggaaaattctgcaatttgattctgcaacctttcagtcttcccccacaatttgttgccaacattcacttcttcttcaccctttgggaccacatgtagagacaacttaaagaaataatttgggcatgtctgggaatgttttaaaattccatatgccattagacatgtataaaatggcattcatatccacaagaaaactaaaggacatgaacttttctcatcatgctggagaagaaaaggacttatctaaccaagtggaattgaataactactgctgttgtacgtgttttggcttgaactgaatggcggctttagaatttttttttatcaatgaagacagttttcccttgagattcttacaccattcaccctgagttctctcaagcatgaacaagtcagccaactttgcaaatccaaagctctgtaacacaggactcttatttcatgacacttctgatttcatacctagtgtttgggagatattccttagaaacttccagatcctaagagtcagtgggaagaaattgctaggtgacacttggaatactctgtgggcccaggtactctgtgggcccaggtactctgtgggatttgtatatgagacaacttggatatttcttaatctgagcctgggtttgaggaaggatgttaggaagaaagaaggataggcagagataaaattagaccccatggcactttttcttttcaaaaggaagatattttgacagctatttattagagaaatgtaactttttaaatcatgtcataatcttctgtgtccccagaatcacctctgtgatttgcaatatgggtggaagtgccagagtgcaggttaaaatcccatccaccatacgtttcagtcaaacagatgtgtcttgtctcttgaattcaaagattgggccatgcctgatgctcttatctctgacaaatgggtcaccagtaagttgaacaagtaggcctcctgggatataattatgagagcaactttatttttatctccattcgtgcctttaaatttgtgccgcgggggtagttctttttctgctcctgggcaaaaactcaggcatcttgtgccttttctggtcactctcagttaataaaaagtcctatggacattgcaagtcacaaacacagtcttaattcagaattacaagtgtcagtccaaaataggaatcagtacacttcactgagactccttcctttcccgagcgagggctggctgcaggcttggtaaggagggcacggtccttctctcctctgttcctctctgatgtttttccttctcccccagcttgctaacagaggtttctgccctctcctaccaggtttgaagtggggtaggagaataaataagtagactatgaaagttgaaagatggttttgggcaaacgtctaaaactccctctgcttcatggctgccttcatgagcactcttgatttaggtggtgtccttccttgggttgcctgctgcctgctccacttcagcttctgtctttggtgtactcttgattgtctcccctcatgggcgattgtcattttgccctggcaaactggtctcgtggataagatttcttgcaccccaccattcccaccactgctctctaagactgatgttccttctgtagactccatatccagattccctgggattaatttggtttcttttcgttttacaaccacagtcttcttcatctttctcattgggtctcccagctgcagggagcacaatcaggcacttcaagtgatcccattaggggctgagttagctcgggtgttaggttgagattaggagagaggacccttcattcctccccttttgatgggctatgactcagtgtagctgtctccaaagatgaaaaaaagttctctctctctctctctctttctctccccaccccctcattgaggcaaatttcacatagcataaaatcaactccattttaaagtgagcaattcaggggcatcgagtacaacactctcttagtctctctcagcccttttattgcctcattcagggtgagggttgcaaagttaacatgttggcttatttgatgttttgcagctattgtatctgctgcctcagtggaaacgtctgatttaacatctctggctgcctcagtggaacctaatttaacatctttcatacttagattatatctttagatcttatagaagcctgtgaggtgggcattactctccccatcttacaggtaaggaaacagagaggaacaatggcttgccagtgttatgctggcagtgagtggcaaggctaggatttgagccctgtcagatctgtccggcaggaactttgggattgtatctaccctgacaggaaatggtggccaagttgtcctcccttcccagcctgctgtgcctgggatccctagccatctctaccctctgagtcatcctagcagcccctgacttcctcaagggcccagagaactaggcctcacgagcagtagtgaaaggtcatatcaaaacaaagcaagaatatttgtgtcccatttctgccaaggagcaggcaggaagggctgcccagccctcttggatctccagcctggcctgagcctggggcctttccaggtgccaaatgcagcagagaagtcctttgccatcagagttggctgctggactcaggagaccaggcccactcaggcccagggagtagtacagagcccttgctatatgtaaggggactcggggctgacagcctctgctcctgaaggaagacgggagaggataaggcacagaccacaagcagttgacccttcaggccttgaggcacccctcctgtgcagccatatcacctgcctcctggtcccatgctggtgggagcctaatggtaggctatgtctataggatagcggtccctgaagcagcattcatctgcctgtaagtctaaaggtggctgaagacaaaggccagaggcttgggtagacagcatgggtgtctgggactgccaacttgggcactgctctcaagaagtggcccttgagtttccaactaatttgacttcttgctttctttttatagggaacccaaaaggtgcgatgctcacccatgggaacgtggtggctgatttctcaggctttctgaaagtgacagaggtgaataaagtagcattactgttgcaggtgtctcttgaggacaacctcaagcctcagaggatttttttttatttgtttgttttctttttctttttttttttttcttgatataacctgggctgccattcacaggcaggagtttctgttctcattagagcaaccccacttttaccatcacttttcactccaaatactgaaatgacccatacgtgacaaatattcagttgatttctgggagtactaagatcccagaaagaaaagcatgcaaacctatttttcctttctaacttcaaataacttcaaaaattgatatacccatggttttgtgtgtacctttatttagaaagtaatccttaataacttgtttttcaaaggtcagggtttaattcagtcattttgtgtttaaggactactagagtctgagaaacaacggcaactgctaatttataaggctgtacttaaaggtaaatctaaaatcaaaaaagctttgatgtcttggcctgaccaaagcatgttagcattttataactggctaacaaaggaggacttttcccacaagtggtgagtatgtcctgcagtttccttcagcataaaggagtgtatcttttcaaaaaagtttggctttttcttcactgtggagaaagtcacactccacattcatggtagatgacattatgaagtgtgtgccccaaacacttagtagaaaactgtgagagacagtttattttagcagaaaactgtgagagacagttggtggctgagcccaggtcaggagccaaggtttgcccaagctggcccaaaagccagcacaggagagtgaaggcctctgcaaaggggtggagagcagggaagtccagcagaggagagcacgtggaggcacagcccacccagatcccaagccttgtgcagggctcccctggctggagtagcccctgtccctagggtcagtcccatctgtgagatgtgtcctgggccctccctttgctggcggggcacagcagggctccctgtcagcattcctctttaaggccctggttccagggatggcttgtgaggccaggctcagccagtgtttggggtttggccttgtctcctcctctggctggggctcataccccagccacagttgcatagacttaggagtctctgggcccctttctctgcaaggactagaaagtgctgactagccaagaccttctgaatccctgcccgggtagcccagggatcctggagaaatggggtgtggggcaggtcctgcaggtgtggggaggaaggggagagagccgggctagagccgactgactgcaagtgaggggcaggccctcagagaggagacttccctgcggagcccactctgctggtttctgtgtgcttcatttggctctttgcttctgcagataacctagacccactgacgctgcgacctaacactccgcttcctatgctgccctgtctctctcttctttctgcaccttccccctccctctctctctccctctctctctcatttcttctctctttcatctcacctctctctctgtcctcaccactcccattcccctccccctcttcctgtttaccctccaggaccattttctctttattgttttatgattctcttgtcgtcttcctgtcagtgtttctttcctttctgtctcccatgcccgtcgcctgcagaaagtgatctttccgagacaggacgatgtgctcatctccttcctgcctctggctcacatgtttgagagagtaatccaggtaagacacccacctgactgaccgggccttgcctgggctccttcttttttcttacagagtcagtgggctcccacttgtgcggatgtgcacatttcctatttgcctttagcacacatgtttgagcgaatggtgcaggtaaggccctggcatcagggaggcacactctgtgcctagaacccataaccctagcgggtgtcacttgtcactggtggcatgaagtaggaccaaactgccctgtcctcagaaggtaccataggggtcagagggctcagaggactttagccaccccacttgtccctcctgggagcattgttccagggaagcccccaggcctgccctgtcttacccatggacacactcagctgagagagaccccagctgatagcatcttctcagagagtattgcagctttgcagaagtgctttaccattcaagctctgtgcagtacagctccgtttatgaccaaaacacttatgttccataacttttataattcacaaactcctaaaagagaaaacaaaagagtaaagttggggaatgaaactggcatggctcttcaggctgcagatggggactggcctgaggctggccctgagacaggccttgtggaagtacagagggagtgggaggaggaatccatatgtgattatggagacaaggaattctccatatatgtgtcactcaagggaccagcatatgaaaaaactgtgtcttctaggcctttcccattttgccttgggggaggtcttatgtaatagtgcaggtaaggccgtggcatctggagagcatgctttccagctttccagacctggattcaatgccagcaattactgtaaattagttttgtgaccctgggcaagtcatgtaacctctctgagctttgtgttccttacctgtagaaatgccacttcccttatagggttgctatgagcattaaagaaaggagcatatataaggcccctggtgtactcctagtcccattaggaaccagccaggggctcccccttggcctcgcactaaacagcacccacagccaacttcagcagcatctccagtactcatggggcttacacaccttcaccttcccagaattccctggggaaatccaacaactctaagacctggagcagacccattagtaggctgtagtacatctcaaaggcctgagtccccagggaggcccatgtccagggtttgggagtaggtgaggggggcacacgccagtgagaatggctgctttggcatctcccagaggctcaggattccactccatcttctgcttcatctccctgtgcctgagtgggacttggttggaaggtgagggggtgggggtcacctcagatggcattcatcagtgtctcatggcagcagccagagctgggtcagggggtcatgggtgccctccatgtagggcagcactttggacagctttggactatcgccagtagtgaccaccctaagggactcctcccttcctgtcctgtctttctagtctgtcgtctattgccacggagggcgtgttggcttcttccagggagatatccgccttctctcagatgacatgaaggctctatgccccaccatcttccctgtggtcccacgactgctgaaccggatgtacgacaaggtaagttctgcagggagtcttcagccaggctgaggggctgcatatttgcttgtttggacagggtctggagccccaggcaggctttcagtgcctccactgccaagtcctggaacttgcctcctctcttgtagttcctgactctttctcattcttccttctcctgttttcttcctattctccaaatacccctgcgggagagattttttttcaggaacttccatcttcacagcatgcctggaccctggcagtgttaaccttcagctcaatgtcacacattcagtgacctcctgcaggggcaaaatggaacatggcttctctgctggccagtctgggccttattcctgggggatatatctagaaatgagacattcaggctctgacagctgcttccaacttatgttcctcagatcttcagccaggcaaacacaccattaaagcgctggctcctggagtttgcagcaaagcgtaagcaagccgaggtccggagtggaatcatcaggaatgatagtatctgggatgaactcttctttaataagattcaggtaagaaaatgaacaagtgattatagagtgacacctaagtatccaacgggtgaccttgcaggagaactggagaagttcatcccagtgccctgtaatcatgtgaaatagtaactcatttgctcatgaaatcaaagcttaagctatgattgaaattttaaacttagacatttttgatttttggagatacgttacatttgagatgagcaagaagaaaacctactatggatagtaggtcccttgatctccacaggcaacagtgtggctttgaccttgggtagtcaggtcagtgctccactgagaagctcctgggccctgaagttctcttgcccctccctgtaatcctggccatggtggctttccagcagcatgggtctagccaaatggttcaaaatcttctttttcttttctgtgttctgtccctttagtatctcccacaccaggccaatcttgaattactcatttctgtacctcctcaaaagtttttaaactctgcattatccaaggaatctgtagtcaattagtagcattattcatttttttcttgctactctatttttagttatgaaaattaatatttaaaatatcttggctcaacttacataaacaaagtgtttcaagtattcttcgtcctcagcagtacatagtaaataaagcatggtattgatttatacatgaaaaaaggcaatgccattaaaatggaaattggaagaaattgtcctaagtaattgttttggattcttgtcaatgatgggagagtgacggaacagctgtgtattttaaggaagggagaagaaccaatattatagaatgccacccagactgatggtacttatctcaaaaggcataaaagaattggtcatatggtggattgagctgcagagctgattgtgtttatcattaggaaggggaaggagtttcctcagctcgtgtgttgtacaacctcaggccttctttctgatcccagccctagcatccaggtaggacccagttgttggatgttgaccttggatgaaacccagatggactggacaccatctcagacatcacaaaatttggcagctcttctttcttcccacaggccagtcttggtgggtgtgtgcggatgattgttactggagcagccccagcatcaccaacagttctgggatttctccgggcagctctagggtgccaggtattgtcattgtgtgtcctcccttggaaacagcaggaagttcgttagggcaggaaaactactataccctctactgctcagagaaagaaccgggggacaagatttttgtgagacaaaagctccctcctctgaggaggaaaaaactcagagccagtgaaagccaggatggcattgccacattctggaaagcccaggtttatccactctgggaaattcttttatctggacctttggaagtttttcacaaagggcaaagggatcagacaaaccatagacagatcatcaatgtgcggtagaatctgtaccatacctgtactgcatctctaccttcttcagcctgcaaaatatcttgcaacccagaaaaggagaacaagggagaaagcccatttatgtgttatttgatctattatgttttgtcatctctaaaagtttatttcttcattttccattcagctcatatttattaagtttctgcatatgaagggtatcataacgtggttgtggctgatggatttgaagtaaagtagacccatctttttcataattgtgcgtgcttaaatttttctgctttagaagccttgatctttattcactgtactcctattccacatcagcatggcctaaccacttctaaaggcagacactcctgcatggtgtattcatgcaaacaggtggggctctggaggggaatagcttatggagccaaaataaaacacagagtagattttaaaatgtttatctttaattcattattatccagatgaaaagtagattcagtggttgaaaataggtcagaaatctttaccctaaactatataaccttatctactaagtgtctgtgataaaaatagcacttctcacgcctataatcccagcactttgggaggccgaggtgggtggatcacgaggtcaggagatcaagaccatcctggctaacacgatgaaaccccgtctctactaataatacaaaaaattagccacgtgtggtggcacatgtctgtagtcccagctactcgggaggctgaggcgggagaatggcgtgaacccaggaggtggagcttgcagtgagtggagatcacgccattgcactccagcctgggcgacagagtgagactccgtctcaaaaaaaaaaaaaaaatagcacttcttccaagcaaatgtggccatgcttgttgtctgtgttcagtttcacctggagttatctacctccagagcacctccctccctccatcgccctgatcatgaagcagtcagacacgctcagtgggaggttagctgtctggaaggggtggccagttagctcttggagggtgtgtgcccatagtgtggcttctgtgttttgtttgaaggtttatgaaggttatggccaaactgagtgcacagctggatgtaccttcaccactcctggcgactggacctcaggtaggatgggctagagatataggactggctcgcgaggcactgtggagtaaaagcagccagctctaaaactccctcatggaaagtaaatttgcatgggtacttaggaataaagcaaaagagacagaaaaaaacattaatggtggttatgtctgggttgtggcattgtgaatctgtaaacactgttgaggtttttcccttttttattcatccttaacacactggaagaatctggtctaaatttggtgagtaatccatgggctacccactacagccctgctttcccttggccctgaaggatgaatctcctcagaatgagggtgtggatgagagctgttcctttttgaggttgccgctgcctttgagacattgatatcacaggagaacgtagttctcaaagggcctctaaaatggccctttaagaaacagtaccctggcccctatgaacctgcctctcctttacacgtcaggtccaattcatagcctgcttccttcattctaaaatactataagcaaggccatgtagtatctagaatctataaaaatccaatatactgatattataaacatttttccatctggagttgtatcttgtgatctattacttcttttgtgcataacttctatttagctataaaagaaataggaaaatactaaaacctgtgacaaaaaaaaaacacaataatctccaaaggtggttcctgtgggagatctgccagcagcaaattgattaaataacttatttacaaaataggttttattcaactataattttaaaagacaggactaaggaaaaaatgcttctatacttagcttggccaaatatgatttcagtttaaaatccacctatcctgtttctgctgactatctcaaggtactctgaaaataatattgcattaaacagcatatttctttcacatgcacatcatcctaaaattttccagtttgtagctgagcaaacttaagtacaaagagtggccccaggcttggaaaggaagtcagtatcctgaaggattcttttgctgagtggttttcagcaaaaggggaaacaggtctgtagtaggcagcccatggattacccatcagatgtagagcagattcttccagtatctaccctcatgtatcccttccttttggacatgtatctcttccctctcaagtcatcctttacattttcctatgtaaacactgctgaggtttttccctttttcagttcactcttagcataaaacttgaaaaggcttttgtgtataaggattgatatctttgaatagtattgccaaaaatttgacagcctctcttttaaaagagaaaccaaggtggtaagcctcatttttcatatacgcggctcaattttctttcaggaccttggctagcatctgcttaaaactcctccaacttgccagtgaattatctaacaaccacaatcactagaaaaatgacttagatgtaattttgtggtaaatttgaccaagagaatttggagtcttattttcatggggcaagtttcttcatcccagctttccattcctttgttattcaacatgtggtgtgggaccagcagcagcatcgccttggtgcctgtaagaaatgtcgaatctcaggccccattccaaacccagtgaatcagaatccacagcttatgatttctagatttccagcatagtaatcaacagtctggtggctagaggaaaagcaatgattgctatattttatgatccccaaaccaagacgtgtgatctgacaatggggaaaatgatttaatgtggccaccattttcaaaaatcttgaccctgtgtttgatgccccccatcctaccctacccaggaccctgtgcacgttggtgctgggccaggtgtgcctgtcctgcttattaagaatcggatgtaaaacaaatgcccaggcagagattggcctttgctttctccagcactttgttttattaccaacacttgcagtaacaaatgcccctttaaagatgtgttactttccatccataattccccactttggccactcagagattttaaggggcttggaacatcttcagtgctaaaacagatctgaacactaacaaatgccatcttgctccggtgttccagggcacgtaggggcgccacttccctgcaatcatatcaagctcgttgatgttgaggaactgaactactgggcctgcaaaggagagggagaggtaaacaaggatttagccattcatgcctgtggctgctacatgtagtgagtaaaaacaagaacagtagggatggaatgattttccttttgccttgtgtataaagtcattttaaactactgattaatttgactcagctcaactcagcatctcctctcctgtttatgaggcaaccaagagctagtgctgggactgagctggtttaaataaagatttggaattcccagatttttaaattaattaattattattattattattattattattattaatttgagacggagtctcgctctgtctcccaggctggagtacagtagtgtgatctctgctcactgcaacctccgcctcccaggttcacaccattctcctgcctcagcctcccaagtagctgggactacaggtgcccgccaccacacctggctaattttttttgtatttttagtagagacggggtttcaccgtgttagacaggatggtcttaatctcctgacttcgtgatccgcccacctcggcctcccaaagtgctgggattacaggcgtgagccaccgtgcctggcccttaattaattaaatttttaatagagtcaaggccttgctctgccacccaggctggagtgcagtggcgtgattatagtccactgaactcgagaccatagcctcgaactcctgggctcaagcaattctcctgcttcagcctctcaagtagctaggaccacaggcatgtgtcaccttgccaagataactttttattttttttttagagattgggtcttgctgtgttgcccaggctgatcttaaactcctggcctcaagcaatccttcctgcctcggcttcccaaagcactgggattacaggtgctagccatcatgcccagccccaaattttgtaaaaattcattttttcccctaactgtgtcatggcctgctgctgtgtgatctgtcccagcagaaacatgatcctttacaaataggccagatggagtagatagagctggcctgtacttgttcattccatgggagtaagtgggaatgattgcctgctaatggagcagggggctgaagcatccctggtagaatcagccagccatcaatatctgtgatgagtccccatcaagtgtcacagagcagcatgtggccaaggccagagggctcctgagggagaagagatgacaaaggcctagggtggccagggcaggggggaaagatggggaggatgttgcttgacagaaggcaggagacagttcagatggctgctggctgttccttgtcctctgtttccatccctgccatatccacagtggctttcctgatgggtagtgcaccttatctccgtatgcctggtgacagcttcccatctcctgattcctcatgatgtggctgagagaagccatggtttttgtcccatagatatgtgtgagaggaccaaatgtgttcaaaggctacttgaaagatccagacaggacgaaggaggccctggacagcgatggctggcttcacactggagacatcggaaaatggctgccggtgtgtatgtttggaaccacggagctccaaacatttggcagtgggagggtgtgtggtccgggtcactgaggcaggagtcttctccaaatcccccctgacaatgagtcattcaggagcacctctggggcctggggggaggctcttccttccctgagccccagagcatcttcctcttctcactccgtctcatgaaggtgatgagggacctgtgcaggtgggtgtggctgaggtcttggagactgaattcctatccttaatggtttccagaaagacatctgacagtgtgtggaatctgatgtgaagtaggaggaacagggggtacatgtctctaggacgtctgagaagggcaaggcctgcaagccctccaatgctggcccgcagccaaaaggtggcactgagtgaaggggaaagcttggagacaggagggagaatgccttagttcctgtggctttgccagcagttgctcatgtaaccttgagcagagcctcatccccgtctgtggcttcaccttgactcacttatagaacaggagaacaagccttcatagcattccttgcccatggcccccagcttttagccaaaaccactttgcctcattctctcatttttaaaatagggatcacagtgttgcttacctctgaaattattgttgtgttgtgcaagatctggactttatcctttattatttatttatgaaatggagtctcgttctgtcacccagactggagtgcagtgacgagatcttgactcactgcaacctccacctcccaggttcaagcgattctcctgcctcaggctccccagcagctgggactacaggtgcccgccatcccatctggctaacttttttgtatttttaatagaaacagggtttcaacacattggccaggctgatctcaaacccctgacctcaactgatctgctcatctcggcttcccaaagtgctgggattacaggcatgagccactgcactcagcctggattttatcttttaaaaatgttttaataaaagaaagaaaaataaagttatttttgtgaggaacaaatgagattatgcctacaaagcacttagcacagtaccgggcacataggagatgcttagatgaatgctttgaccagaaaacggctgtcactgacactgagcactcttgcctggagcagcccaccccaggaaactctcctgtgtctttgggaagtgctaaggtttgggtggacattttgaggtgttgagttaatgaggcacgtgaatgatgttgagcccaaggcaggctgagtgggctggtaaatggatctgcccctgcttgggcctgtgtacttccctttgagaaaccctcatgcctgccccagacaaagatgtatctccagtgagtgccctggcccagggactctgcttaggggagatatgcatgattagacagttcccaacccaatgtgatgggcatgagctgggggcacactgggggcacactcacctcgggagaggcagaggaggacaggcacctactgcatccaagccttaggatatgagtcatgttccaaaggtgggattgggaaggacaatcagggcgtgatagtaatatatgctgagtagaggcactagacatgggaagcaactaattccaactgaagacccataggtgtgggagagagaggctagagaggtcagcaggtcctgaacatctgcagaaggtggattgtcctgttggctcagggagcttaggcttcaagccccctcacttgcatcagccccttccaaggccctgcacttcattttacctggtttttcttagaaagggccctcaatattgtaaaagcttgaagtctcacaaatccctggatctgctgctgatgccctgtaacttgaatgaaaccattcaccatttagggggtaatatgaagcaaataaatgaattcatgtaaagcacttagtgttgtgcttgagcacagggcctaaagttgcaggcaggtagtctgtgagagtccattttttaaattattatttttaaatgatttttgaaatttaattaaaatttattgcagctattgagatacttattattctatatttctcatgtaaagcaaatcatgcattcttgacataattcaacttaatcatgatgtgactttttaaataatatttttcctaaaaattgtgtttgacctttccatttatattcacaaatgagattgatctgtaattttccttttatatacaaccctattatggttttgttgtcagcttattgaatgagttggtaagtgggttttttccccatttttttggaagagtatgttcaagctttgaatgattcattcttgaaatttaggtagaaatcatctataaagacatttgtgcttttaaaaacgttattttgaaatcatgttaaatagatcaaggaataagcatagtcttctggtccagaaggatcgggattcaaatcctggttccccaacttctagctgtgtggctttggaggagttaactaagctttctgatcctcattttcctcatctgtgaaacagaggtgacaacacccagctaatggaccatgaggaccaaataagctggggtagggaaagtgcctgatgtctagcctgggttttgagcaaaacagagtctgctcatttttctcttttggagagattgctctggcactggcagatcaagcagatggagtggagacagagtgtgtgcagaagtccagtcagaaagtggttttgctgggaggaggtggtggatatgagatggatttgtgagcaaggacaggtgagcctgaccactggagatcccaggagaggcaaacaacaaggtcatctccaggtttggggtttggaggctggggcaggcttgagaagcttggtcgtgagtttcatataggagcatgttacatcctctgagacaaatagcctagtttttgaagcattccaagggtatttgggttctggatctggagctcagtgaagagctggaagcttgaactgacttgggagtgaccaatgaagagaaaacggtggttactccaaggtgcattgtcagtggcggtgaggggaaagaggcccacgtaatcaccttggaagctcagaaaggtcaaggagagtcagggaggtgaggacgggtcctggaggccagtggcatcagcactccctgtccaaggaggtgatctgcctgctgcagaagtcctacaggggcctgggctcctagtgccatctggcatgtcaggtaggagtcacaggggctctgtcaggtctgtgctatatgccaggggatgcagaggctgctctttaggggtggagacagtagctgggcaagagacttgagtgtggtctaagggagtgaaccaaagatgctggtgagaaaaagggcacctggaacaagggtgtgtgcaagaggggtgccctgatggaagggcggtgggcctccaagaaggaggaggtgaggatacctgctgctaggcatgagggtggcagtggtgggaggactgtgtggggggctaactgctgaggggaaaggacagtggatgctcacggcccagcagaacttggatgccatcaacctgcggtgtacagtggttctctccaggagccctgcagctccctaagagcagacacaacagatggaaaagaaatcggggtggggtctgcagggtggggtagggcagggagttacggcactgaggagcaaaggttcaggcttgagagtgccatgttcttataaagctgtttgtccaactctacaggcaggaactcttaaaattattgatcggaaaaagcatatatttaaacttgctcagggagaatatgttgcacccgagaagattgagaacatctacatccggagccaacctgtggcgcaaatctatgtccatggggacagcttaaaggtgaggcctctaggcttcagccctcccacatatcctgggcatgctgaaaaacccagattaaacattaacctccaatcaggcaccaggattctcctccgcattttaaaacatgagagaaaactcctttttaaaggagaaatcttacttatagtttgttaaaatgtaattaggtcaagtaaattgtctgaagtagtactaatgaacattcccattccttttcacttatgctctacttacttccaaggatttttgagataaaatactagagcaagattcagggtttctactgtttttatttttattttaaaaattattattactattattattattgagacagggtctcgctctttcacccaggctggagtacagtggcacaatcatggctcactgcagcctcaatctccctcctgggctctagccatcttcccacctcatccccttccccctccctccccatccccaatagctgggactacaggtgcacaccaccatgcccagctattttttttttaatttttagtagagacaaggtcttactatgttgcccaggctagtctcgaactcctgagctcgagtgattctcctcctgcctcagcctcccagagtgctgggattagaggcatgagccatcacacctggcctgttttgatttttttaatatgcaaatgaactttacaaattaatgagtactgcaaaaaaatgtactaatggtactaatactaatataggttactaggattcagttatttggaggagttttatacttattttcctttcaatactatttagatttaaagtcagaaagatcatgagtatattctatgatatctaagatatcaaatatattcactctgtcacccaggctggagtgcagtggcacaatctcggctcactgcagcctctacccccagggttcaagtgattcccttgcctcagactcccgagtagctgggactacaggcgcccaccaccacacctggatatattttttttttatttttagtagagacagggtttcaccacattggccaggctggtcttgaactcctgacctcaagtgttgtgcctgcctcagcctcccaaagtgctgggattacaggcataagccaccatgccctgcctgatatcaaatatattctgtactatcattgcatttctataaatattatgaaattattttcaaagaaatgctttaaaaatcaaaataggcctggcatggtggttcacgcctgtaatcccaacactttgggagaccgaggcaggaggatcacttgagcccagaagttcaagaccagcctgggcaacatggttaaaccctatctctacaaaaaatacaaaaattagctacatgtggtggcatgcacctgtagtcccagctactcgggaggttgagatgggaggatcacttgggctcaggaggtcgaggctgcagtgagccatgattataccactgaactcctgcctaggcaacagagtgaaaccttgtctcaaaagaaaaaaataaacaaaatgaagtctttcatgaatgaagatcgtattaatgaaaccatttcaacgtggtttggtaatcctgggaaacattttggttcagagaatttggatcagagagttgtttgctcagcctcctgaagatgtgctgatttgagattggcatgagaatcaaaggtgcatatcagtctaactttactgattcttaatgtccttattttttcatataaaactaggggaatatatcagaaaatgaatggtatgatatattggcagaaagatttcatgacatcaacaaatgttttataaacatatacttagtttttgaaaaaggtggagtctgagaattttaatgctggaccacaaataaccactttaaatgcatttgtcatgactgtgttctcctttggtgagcactgcaggcctttttggtaggcattgttgtgcctgaccctgaagttatgccctcctgggcccagaagagaggaattgaaggaacatatgcagatctctgcacaaataaggttggtatcttggggctgtctcctgaaaggttactgaatgttttatggtaccacataatgagaagacagaaaagttgtagaccagtgaaattcgagctcgtacgaaatttctaacattactttatatatagtggggattctaaaccagagatttgtctttttgttactgaagaaactcatatttcttcttagaaagattgacaaacgtttggattttaagccaggagacatcacagaaagcttatccagccctgttgctttgtggcttagaggagagtccagggaggggggtaacttgcccgaggtcacacagctggttagcagcagagtcagatgtgagcataggctttctgactcacctgccatgctccttcagatgtaaggtggattttgtgtctgctgggtgtagacagctagtcatggaatagaaaaagtagcacaattctttctgcttagagcattagctactcacaccttcctgaaaccttctaatggcacatctagaactctgtggaggaggtcgccatgctgtgactcagtgtagccccttgagtcacatggtccatttcttagtagtagccatagaccctccctctcctacgggaccctgggccctgggctcatctaggggtagcaagactcaccaggctgaccaaaagcctgctttaaaaaaaaattgagtggtcccttagcccattcatggtcactcctttggccatttcaggtacttacttgccagatgagaggtggtaattggagtgttgccagggagtatcagcctcagttgcgggctgtgggttagcacatgttggcacaatcatcagttgtactttacccaaaagtgttgtttcctctacctccattttgaaatgtgttcttgtcttgtaatttttctcatatggtttgattcaggatctgaagaaagccattttggaagatatggtgaggttaggaaaagaaagtggactccattcttttgagcaggtaactgttaccttccccatactcgttacaacccttcaggcagtgatgaaaattaaattaacccatggtgaccctgacctagattcctgacttttcatggtgtggcccgccagcaggctgtgtaccaatggacccctgaaggcctgttccaagctgcctcctgaaccaaaataggtcacatatcaaaagagattgcacccatccttataattacaaactttcataaggctgaaataataccctagctgtcactagtaaatcatgtgtacatgatctgtcttccaagcttcctgcattaccgaagacgacagtcctatcttatttttatttttgtggggaccgtcttcttggcttcagcagacaagtttacttgttaggaggacactggaaagattggtcttctcgggccagtgatctgtcagcccagcatgccctctgtaaagaggaggaaacagaatgctttgggagaggacacagcagtcctccaagacttttttttttttctgcaaggttgggttcttactgtaattgagctcataagcatacttactctgacttacatataccatttatacatccccttttgtcaaaaattcaaagagaaaaatgcttcaaatggaaaaatattaatatactgatttttaaaatttccttatatttaaaataattgtttttcataagataaacatttcattaaaataattgtttttcatacaagtttgttaccccaaatttagtgacaggggtcttcaagtttgacaagaatctttaaattttgtatattcgcttaataacctaaaaacatttaaaaccagtttaaaatataaaactcttacagtgctttaatttgcaattaaaaaaacattttcatggattaaaatttttattttttagtttcaaactatggaaatctaagcatagtttcagggtctaaaaatactgtttttctttaaaaatagatctttacattaatccattttgagaaacactgctttaccctcaactgtcagtatgttttagggcaatttaggcctgggtaaataaatattttttaaaagtatggaatctgaggcattcaggcaagttacatttatctttctaaaagacaaaggtcaattttggcatatgaactgacttcattgcccttcctcagtggggagttgtgtgatgggatcctctgtgatcatgtagaccagagaccacaaatgagtggtcgtaggcctggctggtctgggcctacgtggatttgaagggctggctgcagcctaagctgcagttcctgcggacatcctggtgcattcacaaggccttcacgcctcctgcttgtgtttggatgcgggacctgtcccagggcacacagagtatcatgacacccagattcctcttcatggaaaaaaataccaactcttaagattatgcttaaaagagacctttagttaagtttccagtgttaaccattgctctggttagagctttcactgagaggagacgagttcttgactttccacatgcctttcgcagagtttctgctctaataatctgccctcaccatggtaacctcaaatacagagaagtcatgtgggatctcagaggcctttagttttattgccaaggctgtcgccttttgattttctctgttctcattctcctctttgttggtctatgacatcctccctaccatagccagtgtgtgccctcagctgaccacaggaaagcaaaaaccaggcctcatgcctgaggagggtgtgctctcagttgtgatccaaagctcaacataaattatttcagttaatccataatccattgtcagcttgtccttttccctcttcctcaaaaataatggccaattaaggcataactctaattaaacacacacatacacacagaaataacgaattcaagttctatatccaaagtttaagtcattcaacaaaagctttaggagttcagacttactggacttggttgatctgaattaaaccttgaattagaaaaacaaatgatgtaatttaatttccaagaacagacaattcctagaactaggccaaccattattaatttatggagatctttggaagatatattttaatgagtagataggtggctgggcagtatttgagcatacttaaccatgatttaaccatttgtttgacatttatatgccttattaatttgcataggcaatacaatgtgaactttgacacttgatagatttttcaatttctgactaattaagcacttactaaaaatattttattgtatttcctgtcattgaaatgaacacttacctaaccaatttgcctttaaataagaaaatgagcatttccctaactcatgtaattgtttttttttaactttatctctcctgttctaaattattcactctgtgtttattatctacaagcaatattgtgttaaaggatttcattaagaccactgaaaaacttaaaatactatgtctctaaaattatgaagtttgtgcttttatgagttggcataaatggacaattttgaggaattttattccaatgccatatttaaatgttacagtatttctgaattatttttaaaaatcctgtagcatctcttttcagtgaaaagagtatggtttcaggaagggaagctaacattaggcatctccctttttcttttcccaacaaaaactttgcttattaaaaaatggaaattccagtttcatgaagtgtgtggcataaagagagaataaggactctcatacctttttttaaaaagttcacaattggacagtttggctttatgagaaaataattattataaaaaatgaacatgtgtttttatcattgattcacttctaaaaaaaactataggtttgtggcccgtagttaaagtcagtgtcagttaaacaactggctgactcatttttttccacttactgcctatattttttagtcactcaagcaggttgtataggtattttcatagaagcatttaaatagtccaagggctgtaggtcagaccagaccagggactggcagcctagcagcagtgccgctccgacctgctcactaagggactgaaaggtgagcccagagcaggctgccatattgcttgggcttctgcaaggctgtatttaatgatatagcctcttctcaggcagaactattttatagacagccacatagagctgcagatgtcccactcagccatttaggtttggggaggtagctggatcggcaatattccaaatctacctgttgatgctgttctttcttcctaagatcataatgttttcttttacatttctacttaaccatataaatgacattatatacctctccttataaatctatatttccagtactgtattttttagtagtttctgcttgtcactgctggcttttcaaagatactcaccccaagttcccatactgaacatagactcttgtcccaattatacaatgttctccacatgctgttaggaatgcagacaagccgaaacccaggctacaacactgagaaattacatcttggcatttgtatctcatttttaaaagcatattattaattttaataacaaaagaaggtggatagatggtttgtacttaccagaagtcttcatgtgatagtgcttctacagaaagaaatttttttgaaaagttaaggatattagtactgtcaattttttagtttttcattttgacagtaaaggttagttactactgcattaaatccctgtaactaaggttaaattttattttgattgtgttaatgttttctttaagctaattaattttgtcatcaaatggtgatttccaaacttatttaagtagaacttagatgacatcttatataaaaattgagcatgcacaaaacataagagcagtgctactcaggttggtttagggcttgagccagagcttctacacacacacttttcctcctaagcacctcacctcatcttcccacccttctccatttcctttctacccttacctatctaaaccccacttctataccatccccagcagtggcctctgcagatcacctagttctcagtgcactatggtttaaaaacgtctcccttgggacctgtttccaataaatattgggtctcttaggatggtttatgttttgtaacaacaaattaggaaaaaagtatattctatagggtacaaagaacagcagccctattccttactgaatctgtgcttctttgaatgtcaagcatactgaaagagttttcaaacaaaaccctttttacaataaccatatctgattttgaaacacttgatgatacacatctttagccaaaatttccagctatttaagatgatacctatctttagccataaatgataccataaagatgatgcccatctttaggcaagatttccagctatttaaattggatatcctagaaataccctcaaaaacaatcttcccatttctcttggagagatttttccaaaatgtgtattcagccatgccattgccctaactaaaaaccttcagtatcttactattgtatttggaataaaatttgagctcctccataaaatggctcatctaccactttagcttcatccctcacactctttgcctcttattttatggaacaagaaaccacttagagttcccttttcacacgctgacatttctcactcccatggctttgttttggtgttgcctctgcctataatgcccttctccacccacttttccccgtttgctggttaactataacccattatttaacatccatctgatttgggaagtcttccctgactgtctctccctctcccctcctatgcctgagatgggtgccctttatctcatgcataccatactgataattgcccagtgtttctctgtctccactactggacgtgaatgtgcgctccctaagggcagaggcattcatgattcctctttgtatcctcagtgcctggcatagagtaagcaactaattcatttctgttgactggctaaatgaatgaataggaaggaaaaaagttggcttttagatacgtaaaataggctgaaatgttctcaacataattttgacttagcataatgtctgtatgtcaatatatctactctcatgtgcctgtttgctttttaccatgtatactataaatactgtgttctattcctgttaaagatgttttctgcatttggtttttaggttaaagccattcacatccattctgacatgttctcagttcaaaatggcttgctgacaccaacactaaaagctaagagacctgagctgagagagtacttcaaaaaacaaatagaagagctttactcaatctccatgtgaagttcaaggaaagttcttctcagtgtaatgaactgtctagcaatattatagttattcttgaaagtaatgagtcaaaatgacacagctgaaaatgaataagcatctgattttatgactgagccttttcctgtcccaagaggtctttaacaatattttctctatcatcaatgagtatattttatttttattataaaaatgatattgtggtggactgctaaaaatatcacaaatggcaatgtaaaaatcaagacattttctcaagaactgtgtaccactaaaagtaatatattgtcaatgttcacagaactattaaacataaaggaaaaacataagtgatatattctacttaattatttgtgaatcagtaaccagatgcagcaaatatctaggcaatgtggactacctcattcagtaactgattgtcaaaatcacaattaaatcagacttcaaaaattaaagctaggtgtatagaatcatgctaaaagaaaacatgataactcatagtctacgtaacttcagagtctttaaacatgacaatccacattgtcatatgtgaaaattttctctctgatttttactttcattcatgaaaaatgaaaattcagaaattctttttttcctttttgttttgagacagggtctgctctgtcacctaggctggagtgcagtggcttaatcatggctcattgcagtctccatctcctgggctcgagtgatcctcctgtctcacctcccaagtagctgagactacagtacaggcacatgccaccacacctggctaatagaaattttttttttagagattttgctcaggctggtctcaaactcctgagctcaagggatcctcccgccttggcctccctaagtgctaggattacaggcatgagccattgttcccagccaaattcagatattattaaaacacatgtcatatttatatagtaacttacaaagacctttcaatacattttctcatttattaagctcattaaagtattcaggaactacctagaaaaaatataatgtaaaactattcaaggatagtgtgtgtatgttcatggacttcttattataatgaattctaaaagacatctgttgactctacaatgaatggatccttgaggaatacttgggagaagaaactcagagttatttctcagggtaggcagcaattaatgtacctacattccttgctggggtcttctagtcttccattcccaatgtgcccatgctatgcctggaaaccctatatggttgtaattctgaacaatttcactttttttccagtaagaatatcaaggcagaaggtgggaaggaggggacattatttccagggaaaatagtttttcaacaatataactttgataaacctctttaaaatgccccaagaaaactttttaagtccatagacaaagaaatactgcctaatggcataattacattcctaaaatctttaagcgtgccgaagtttaaccactaaaacctcctttcttgcattatgtatttagatgcaccctgtattggggtgtcaacaatttcttataattaaaggccagataccatggacagcaattaagttccaagctatagattgtgcctctgaaaaaggcatggaccccaggaacgtgtttttcttctgtagagacaagactctaaaagcatatcaacaatccatatgcaattcatgtgttaatttaaaatgtatgtgctcagtgtttgtagtctagaagctcctttcccttggaggaatgccaagcagtttgcaaaaataaatgctgttagttaaaaaccacataatcacatgggcctactgaataaatatgcatcagtgattatatacttatatttcagtcttgtcaaaagtgaatcactgtttcatttgatgtatttacccagtctttttatccagtttttcttgggcatattctctctgaagacccactgttgcacttctaaatttgacagttaagaaatgagctagttctatacacactgatttttaaaggcgtttctgaataaactaatacttaaaatgtccaaagtcacatctgtacagcattagatttttatatttaatatatatttgactaattaaaagtgaaagttgttacctgaactggatattcatactattttaagggcaagttgcttacatttcaataacaacaaaaaaagaatctgtttcccattgtcctcctactcaactaaaattcatagttggctttaagcccaaaagaattttgaacaatgtgacagaaacaagtaatgtaaaacttattttgttttatttatactttataatagttagatataacagattatggacaacttaatatttcttctttttggctgggcgcggtggctcatgcctgtaatcccagcactttgggaggccgaggcgggcagatcacgaagtcaggagatcgagaccatcctggctaacacagtgaaaccccgtctctactaaaaaaatacaaaaaattagccgggcgttgtggcgggcgcctgtagtcccagctactcgggaggctgaggcaggagaatggcatgaacctgggaggcggagcttgcagtgagccgagatcccgccactgtactccagcctgggcaacagaacgagactccgtctcaaaaagaaagaaaaaaaaaaaacaaaaacaaggtttcttctttttgccacttaaaatatcttatatttctagatttccaggtctatgtggaaatcatcacacttgggccaataaatgggttagttcagatgtgctgagaaaagtaaatagtgtaccctaaatatcttgcatgtacatttatctatttctctgtttaatgccacttaattttgtaagaaatgagaaatgaaaccctatgtatcagtggaaaaatccttcttgcttcagatttcccaactttattctggaggagaaaaaaatctgtatttctcattaacagagatagaaaaaggtgatgtacttacgatggtcacattcatattgggcattggatctatttaagcctagaagtataacagataatcagttccttaagtgtaaatatgttcttaaatgtttggcctttttatctgttattcaaatgtattagtaattctcatattttgcaaacagatccttttgtgtatattataaaatatataccaaatctgtttttccttttgctgtggaagatgtctttatataatattgagacttcccttgcaaatgagagacgggactctggtcaggtatagtgtgtaggcctagccccatgtattaggaactcataaactcagaaatccaaggattaaacattttatgtctccttcatttatgcaagtcatgctttcattctacatgtagttaaaactacaagtatgagaaaaaatagaactttccattggaattttttccaatcaggtaatgttttagcaacttgaaatcagcacttaatttgattgtattacctatcaaagaaccaataacctttcctttttctgcagtaaagaaaatgaaatatcctttattttccaaatgtatgaagcacaaatgcaatatagttatttaaaatataaaatactttaaaatgaatgtgaagaatgggaaaatatatttttgcatgaaaacagactacttacaaatgtgcttaatatctcaggaaaaaaagaatgaataaccgtatataaaattggtaaactataaattggctgtatttccttgccggttttaattttaaggaagcatttacatgaaaagaaaaaaggatcctagtagtctgaatttcctctcaagtatgctagaaaatactttctatgaatttacaattaactgcaataagaagtgggttagcattcaagtaaggtcaataccccaaatgagaaactcttcagttagaacacattagtggttgtaacacagaggcagtagataaatatttgaaatgtgagcatttctaaacttggtaccaaatggaaagggtttcatgaggtgacagtggcttttaaacattcatttgaccgattattctaattttccttgttaaatcattgcaacagttgcatgggggagaatggatattttttgaagaattgcttattccactttcaatttttaaaaatcgaggggattaaaatattactttttaaatatgcataaaagtatcttaactgtaattacattttcagttgctttgttatagtagcatgcatattaaatataaaatgcatttatgaaaatttttgtaaaaaataaaagatttttcatttctcaaagttgcttataattactattttatatatttgcataatataataccctcatgtgagtatatttggtaattatcaatcacagttactgcttatgataaacatagtaccaagctgcattaccaatcagtatactttacatccgtactctacgtcctctgttaaagttccacaaactccaagaaattatggtccatccagagaagagctcctttgctcaagcctctgttggaatttttgctattgtcagatatctcctggatttaaatcatttttatgaatacataacaaataactgtcttcaaattttccatgatggtggcctttaaaatataatttccatgtcttttactcatattcagaataatggatacaatttcttaaaataatgaattctgctgtgtccaagatagacagattctgccttctccatatgtttgctatcatccattcctccctattgttacagctattagtgtagtttgtgccacccttatctcttgtctggaatattacagtgctttcttaactagccttcatgtttccattccagcatcctcaaatttcgccatccacatttcagccagggcaatctttctaaattgaaaatctagattgaaaatgccactttcctgcttaatagtccttcagtgacttcccatagtttccaggataaacttcaaactcgctggttcagcacacagggactagcatctcttctactccctcctctatggagcctcggctccaatcatattcattacttttgtagttccctaaaagcatcatactttcttgtgcctacctgcctttacacatatagtccctttctcctagaatgccctttcctctaattcccctaactccaaccattcatcttttaaaactcagattccagcatccttttctctgagaagcttcccacgtggttgattggttgatggtccttttgccccacccccacgtagactgagttgcttgaagttttatgcccagtgcggctctggctgatagcagatgctaaagaaatgttaaggaaaatccccttggtcctttttcttgtgttgcatagcattaagactgcaatacctgaaggtatatttcctctctcactgtaatttattccattcttgtcatccaagcaaaaataaactggtttgtggttggattcccatagttcacggatagcaccacaaagatgctcagtgggttactccataagaaaacatcattcaaaaggatttactttgggctccagtgaatctcaaacccacaaactggctgttttcccaaaagatttattcagaaatctctttgacatttgttttcccatggaagttaatatcttcatgactgttccaagcctagtcaaatccaccatgtgttgaaatgaaatgctgattactgagttttgggtctaggtatggaagcagtgcaatggggaaatggaagaagtttgaacactcatgattaaacacttgcactggtgtttgcagatttggaagtggagtagggggagatagatgactgaatttgagatatctctgccctgtctcatcctttttaggagacacgtttctttccccctttataggttgactctaggtgaagtatcaaagagaccaagtctgtctctagttccttcacttccccttgccaccaaggaattcaagctcctctctttgctccccctacttttctcccagccatgtgttaggaagaatgggagtatgacaagcgcagcagccagatgccaggagaaccatgttccctatgccaatcatctgttttaaatagcttccctacactctggtttcctcagtggcaaaatgagggggcatctagatcatctctaaggacccttttggctaaagaaatcatatcaaagtttatttctggttttgaaacctgatacgttaattcccacaaacctatgggaattacttgatgacatatcagtgaatgtaattcagtatagtgagacagagttctagggaacaggaccaccaaatggcagaccagcttttggtttaacctattttcattttgcaatgtttcttccatttctgggcctaaggcaccccaggctctagacctcccaaatgtcatttaagaagtctgaatttttttcacaacagcccccaaagggagaggggggagcataaaggcctggcttgtaaactagagactgcctgccagcatattatggacacgactaaagaaagaatgttgaaagatgataattgctttatactgcagcaaggctgtgagatctttaactgaaggaccatttctgattcacttctgtatccccaggacctaccacagtgcttaatacagattaaggtgttcagtaaatattgattcaatgactcaaaacccgaggtaaaaccaggtaagaatgcctaccatctgttctttagaaagctagattttgatgattaattatctagtaaattgattatcataaatgtttctgtgagcagattttaaataaaatattcagtgattatattacaaaaatactgtggatatatatgtgcttatattcgcacatacaagactgaggtgttacagaaaaacctttaagcttttcatagttttatctcttcaaactgcattttaaatgttatgaaatatttccactttttagaataaaaagatggttattgttatgtgcataatatgctcatctgatgtcgccagatggttcaacctagggtatggagagaaagggaggtaattccaacatatctctaattgacagagcagaagagtttgctaccgagcagtcaatgggctcactgcctgatgaatgcagaggctaataccatggcactggcttttgggaaaagaaaagctttattgcaagtgggctggcaaggagacaggaggaaatgctcaaatctgtcttcctaagctggggtttggtttggtttttataagcatagggtaaagagatgtgatctgattggatcttgtaatgaggtgatgctgggaggcatgatctgactggatcctgctatgggatgaagccagagctcaacccggttggatcctgccatgccatatctacttcttaattcagtccctcctccttgatctgagcacttggtttcccctgtggctgcatgcttggttcatctaggcatgctcaggttacatgacctcagggttcatggcaactgaaaaacaactcacaattttgttacataaaagttgaaccaaggctgggcaaggtggctcacacctgtagtcccaagaatttaggaggccaaggcaggaagatcacgtgaggccaagagttcaagaccagctgggataacatagcaagaccccgtctctataaaaaaatttacaaatcagctgggcatggtggcatgtgcctgtagtcttagctactcgggagacagaggtgggaggatcacttgagcccagagtttgaggctgcagtgagctatgattgtaccactccactccagccagggtgacaagccagaccctgtcttaaaaaaaaaaaaaaaaaaaaaagaggagaaggggaaggggaaggggaagaaagaagaaagaagaaaggagaaaagaagaagaagaagaagaaacagatcggtctggtgcagcaacaagttgaggcccagggcacaaggaggagagcccctatggaatcttctaccttaaccacaaggatgcccagatgtctagagatggctcctggacacaggctaagggactgtttgtcgtccagaagcagcctcctagagcccgggatcttcagaggcttggttagcctcttaattaccatagcttcccagtcagttgcaggcccaggggactgaagttgattcctcagggagaagctccttgtcactttaaggtgcattcagtcctctttgtgaccttcctgcactgaggccaacccctcacaagactgcctgtgctggtggcctaaaactccattactaaggccttatgcagtgctgatagggagagcttgctcagaggaagtgttgggcccacccaaaggagggaacgcctttactcctgcatgcccagttgaattaagcatgcagccacaggcgaaacctaagtgctcagacggaggaggaggggctgaattaaacctttttctggacgaggaaaaagttttttccaaaaaactctcgtttcgctggagttgaaggaacctgcgccagaaggccagaaaccactgggcccctataggaaggctgggcggctgccgcgctcctccgttttcccagaagcctctgcgcggcctcacagagataaaagcgcgggagcgaggcccggcggctccagttctggggcttttgctttcgctcgattagttgctgtgaggctgctccgcgggcctcgcctggacgctgactccctgtgacttagccctgatcctcaggaaggcaggccatcgagagtccagaggcacccgtggcctgggggtagggtgggatagcaatgtggccgctacgggtctatacccgcaaaaagcgggagggtcagaggctcaatctcaccccgacgccagacctaggctctccagcgaaggccgaggccccgccaggtacaggctcaaggctcgcccaccgtaagctcagccgagctgcctccgggacgggaccgagggcgggcgggggtgctaggcctcgggcccaggacccccccgaagccggtgggtaggtttcttgccctgaaacgtgccgccctctctcaggttcgaagagaaaaggcaaagtgcacggcttgtcgaagattgcagagaaagcagagcggagcaggcagggaggtagcggctctgggccgttcaggtatgtagcctccagtaacagcccgatcctagcttgccacctcagaaaacttcaagccgaattttctgctagtagccttttattctaacagtcaaggagcaaaacaaatacagtactctgattttgctcttctcagaacatggaccccaaaatttgacttcaggaagatttatttttaaaaaggggaaggcttgccaatttacgtaaaaggaagtgagataaattggtcggtgagctatacgattgtgtcactgcatttgggttttggtgcaagtcaccactctggtccttacttcttcctaaagatgtccctaaagagcctttcagattctaaagagtctgaacagagacgtggagagccaaatccagatggtgcaaactaattgcgttgtctctttgttagccctcgcttaggagttacaggagagaaaagcctgcaagaaaataggtctagtgaagacacccaggatgagaagattgcatcgttgcgtgtatgtatgcttctcttttagtccttggacacacttagtgtagagactatcagtacctgatgtacctccggatgaaagaataaaatgggctttgttctgtagatgttacatagctcaccagtatttttataaacacttacgtgtctttagacagggccttgaatttctgacttgggtagattcatagtcatgcatttttgtttttctctttctcttgacacgtttttggagaaacgtccataattggtgaattttctgtatgacaaatacaaaatgttacttaataactccttttttcatgttttccatttgattttccattaacaactggaaacattcattactaagggtttaatatgttacagagcattctaatgtttattcattagaatattttataacttcttgatgtgctgtatttaatatgaattctgtactatattttaaagttgtacagcactaatttagggaagctcagattttaaaaattgcttgtgactcatctgacattaacattaaacttcatagtcaagttccttttttttttttttttggagacagagtcttgctctgtcacccaggctggagtgcagtggcacagtcctggctcactgactgcagcttctgcctctcgggttcaagcgattctcctgccccaacctcctgagtagatgtgattacaggtgtataccaccacccagctaatttttgtatagagggggtttctccaggttggccaggctggtctcgaactcctgacctcaagtgatctgctcgccacggcctcccatagtgctgagattacaggcttgagccatcacacctggccaagttctatttttttttaacttaatattcctttataacatgtttttgggggaaggcagtttcaacacaagacatttttttaaaaggcttttatccatagtttaacagtgtaaagtagtccttgtagagtatttatactatgaaaaaatagtgttttgaaagtttcttaaaatttttatatatttctgttccttttctcctgtgctttaaaaaaaatgaccagttgtcttattgtatattcccatacattaaatagtcttcaaaaatatgactttcagtgtcttcatagtgctttgtcttgtagatagatacactgtaatttgtattactatttccctgtggttgggaaattgagattgtttccaaggttttgctgttattgatatccatagacattctgttacagaaggtttttgtgtacctcacattgttaccctaagataaatactttgcagtggatcacaggttggatcatgtttcaagtttttttattcatgttgataaatcagcaccatcttacctgaaacttttatatatatgtgtgtgtatatatatgaaatagatagatagatagatgaaaagtagcatgttttttacttttcatttctttgaatgctggggaagtcgatattttttttctcaaattattggccatttgtactgttttgtgaaatgtctattaaatattaaagatagctatacttttgtacatacatatataaccaatatttccatatttgtttacttgcctttaattttatttctagtattttagacttactagtcttttcttttgatttatatatttgcctctatagatggaaaaaaagcccctccccactagggaaccagaaaaatattcacctctatcttctatttgctgtcatcccacagtagttacttgactagcatattgttgattacaagatatgttcatagtattatattttaatatttatttttaggtttaatattaaatatcagattacatctgaacaataaactgaatgaatgtattatatatatgaaacatataaaaagttgatgttttcatttttctaaaataaatctgtacaagattataatatagaaatggtcaatctcataattttgctatagctttaattcttatttcacttaggaatcagttactgatgacctccaggttgatagtagttcatcaaatagtgaactagtatcaggtaagactgtcaaatgtgaactccctcagctttctgtttttcctccaaacataagcatccatctgtatctctccccatcttcctatctcagtggaagaggtatcttttccctactccaaagtgaatccttctgactgtgctatagatctcatccttaaagcctttaagcacatgccagtaaatgtgaaattacttgtgataagtactgtaaaagagattgacttgagtgtgattgagtttacctagagaaattagggaagacttccatgagggaatggtaattgaattaagatctgaaggagagtagaaattaactatgcagagatgagtaaagagaaattcaggcagagggaagctctaacatgggactgagcattatgtattgagtaactgaagaaggccagtatgactgcagtacagagagtaggaggatatgtgagtgtaagacaggattagacaaccagtttgaggccctgcatagccttgtagtccatataaaaaatattgatgtttatatttggagcagcaaaaagtcattgaagtcattttaatagagaatgatatgatcactttagctgcagtgtggaagaaggactggaaagaatcaggagtgcagttaagaggctgttcaagtagtttaggggagaaataatggcgccttctactagggtggtgacattggagatggaaaaaagggtgctgatgtgatgtgatggctattttaggtaatgagacaggatttggcaaatgaagagtgaaggagatggaggtgtcaaagatgactactgtttctggcttgtgtaactggatacaaggtagtgtcattcactgaaagaaaaactggtttgaagaaaagactagaaattcagtttttagtatattaagttatgagtgcatttaagatgactaagtagcaatatcaaccagatagttggatatgaaaggctggagatagaaatttgtgagccatctacatattggtataatcaaagttattttgaaaacaaggatgccaccagcacatcagaaatacagaggaattcttaaaagcaaatgagacaagattgatgaacatatcaacagcaggaaaaaaaaccactgcagaggtaaaagtagcctggaaatactctaaacccttgatcagtaaagcaaaagactgtaatagaagagatcttgggccaggcacggtggctcacgcctataatcccagcactttgagaggccaaagcaggcggatgacttgaggtcaggagttcgagaccagcctggccaacatggtgaaaccccgtctctactaaaaatacaaaatttagccaggcgtggtggcaggcgcctgtaatcccagctactcgggaggctgagacaagagaatcgcttgaacccgggaggcggaggttgcagtgagccaagattgtgtcattacactccagcctgggggacaacagcgagacttcgtcacaaaaaaaaaaaaaaaaaaaaaaaaaaaaaaaaaggaagagatcttgaaggaattgtcaaggcgatggattaagaactacatttgaaatatctggtccctttttcataatcccctaatatattggaaactctggcagctaccagtgcctgctgccaggagaaaaccctgataattactcacaagcaaagtgaactatcgggggggctggctcttaagggtcaatgttggggctgagttgataaacagaggagagtctgaagtaactccatattgctacaaggatagcagaggaagaaaaaagtaaaagatgtagtcaattcttatgtttgttaactccataataaagttagtatggctctctgaaccgtgagacttctgatacagcagacttccagtgtggacactggccggacagttagggcagtgcccccatgtcacctacagtacctaaaaaatacaggacatccccacctagaatacaggttcccagaatgtctcatcactcttccaaaatctccagaagcaagccactatttcagaatttttacttactgccatataaacagattctcagagacacaaataaagcaaccaggaatatccaaacttttgaagaaaaccagttccatggaaaagaggcaacaaatgaaacaaacagaactaacatttgaggaaatggcacaaaactaaatatctgtagataccagaggccgctgaatccataatatagcaggctgctatgaaaaaaaatatagtccctgggaactaaaaatattatttcaaattaaaacttaaccgaggagtctaatattggaattaattcaactaaaattagtgagctagaaaatagactagaggaatatttcctagaatgcagtgcaaaagaacatgggaggtgctcaggaaatgcttttctctccttcttcctctcccttctttgccttattaactttttcaaaaataaattcagcagctatttctcctgggaagcctcttctgacttctctttttctaggtgacttgttctaccctggtagttctgtggcactctatatacttctgtcaaaagacttaaaaccacagtgtaattgttttcgtctgtctttaactcttcaaaaagaggaaaatggctctaaaaccattgagaattagcactatcttttatcttcctatctcatgcttggaatacagtttcaaagataatacaggttcaaataattgtcgaatgtctcaaatgcttttggatgggtcttgtactctatttagagaaaataccatttaatcataatcagcattttctaaaatcatagtttaaatatatgagaaatgtccttgattactaggtttatcaagttgacacgtgaaaggtataaggaaatagaaaattagttgtctctaacttacaaactgcttgtattctgagagttcatttgctgattgatatttgaaacctgaaatactttttcccataataaaatactgtgatgggctaagttttgagcagcccacagaattttagttaacatatgatttattgttttaattctaccttggaatctagtaactttataacacgttgaaaaattaattaaggattttatatttaatgtggaagattgaatacacatttacttctcttttctgaaaccctactaaaatatcaataaaggcataaaaatgttgtaaagctgtaggttcaaaaagaagagacctcagctaacaacagataattaatgaaagtttggaatgtggaaggtagattaatgaattataattgacctaacagatcttaaaaaaaaaaaaagctgaaaactaggtgtctagagtagagacaaaccaagaaacaaactgattcaggctaaaggttcaggaattagaggcattacatattcctggaggaaatctttaaaataagattttttggaatcttcaaaagtaacagttagatgctttgatcctttccctaacacactgtggccaggcaactatgcttcttcccaccctggtagtctaagacattgaagcagagggactggattcaaggatactgtactgaaaactagcagtggccggggaggaaagggaattaagtgaaagtctgtatattttgatgtgaaatccccagaccccttatgcactcaggcaaatacactccaactagaagattagaggattcctcttttggaagtttctgtccccaggagaagactggaatttgtgcgttctggtaatatggcctggtccctgtctaaatactcttcagtaaaatccacttcttcctaagcccaagttattatgccattttggtacttcattctcgaacattcaagaattagcagacattttaagtaaacatttaaaataacagctactaaataaaagaaacttgaaggacaatgacaatacaagaaaaatcttttaaaaagccacagtttcattaatatcctcaggatgatggaaaaatgttatgtccatgaaacaagtgcaggctcttgtaaaaagtgttcagaacaaaaaaatttgttaaaaaataaaaatatgaaatcagaaaacattctgtagaattggatgataaatttaaggaaatattccaaaaagttgaacaaacatgaaagagaagataaaggatagaaatagcatcagtggtgacacaactccataagtctacaaaaaaaccactgattgtacactttaaaagggtgagttttggccaggcacggtggctcacccctgtaatcctagcactttgggaggccgaggcgggtggattgcctgagcctaggagatcgagaccagcctgggcaacacggtgaaaccctgtctctactaaaatacaaaaaattagccgggcatggcggtgtgcacctctaatctcagctactcggaatttttgaggcaggagaattgcttgaacctgggaggtggaggttgtagtgagctgagatcataccatagcactctagcctaggtgagagagcgagactccatctcaaaaaaaaaaaaaaaaaaagggggtgaggggcgagttctatggcatgtgaattatatctcaataaagttgttattttaacaagaaaaataattagaagatgagtccaatgattctaacatctcaaaaacagtagttcagacattatagagtaaacagaaggaaaattattaaacacgcaaagctagaaattttcctagaattaaaaatggtcatgagtgtatttactgaaagagccattcagattctgaatagtatgaacagagatactgagagccaagtttggacggtgcaaactgtgctcaccccaataaatgaaaaaaaaaccacaccaagttacaacattatataatttttaaattctcaggatagagaaatttattagttttccagagaaaaaataatcagttgcaataagcgatcaagaatatcaatggcattggacttctgaagaacaactccagaaggtagaacatggtggagagaaaaacgtattcagaattctgaagaacactgattttgcagagtcaaaatggactcccactcaaaagttgtcctggatgtcaacactgattatgccatccacacaccaagaaggtatggaaaggtatattactcatataacgagcctttctcgggggaaaggtgactccaagcaggactgaaaatgacttgagaatgcaggggaaggagacctggcctgtagttttcatgatgttaagaggattggaccaggttgaggtttcctgtgcatggtttaaacttgctaccattgccaaaagatggaacaccaaggctctcttgtcacccagaggtgaggtgggaaggggaagagggaacagtgaggtttaaaagctgtcacacatcaaaaaattaaatcagtctcttaaatatactaacctagaattcttacccagccaaactgtcactcagttgttaggataaaggaatttttagacacatattctttgtaccttttctcagaaatgaagcagatgttcgtgaaccaggaaataaatcaataaggaagaaatcatgggatctaggaatcagagtctcttatctaatacaggaaatatgtgaatttcttaggataatggtaaagggaaataccaagaaaacaactgtgtaggatgcatagaggacaaacagtccaaatttgagcaaatggattgagatctccaatagctatacttttttaaaaaagaagaaaagacagaagaagagggagagagggaggaaaataaaaaatagataacctggtgtttttaaaagtattgagaggaaatttatactcttgggaaaagttggaacaaggccgggcgctgtggttcatgcctgtaataccagtactatgggaggccaaggtgggaggattacttgaggtcaggagttcgagaccatctctactaaaagtacgaaaaagtagccaggcgtagcagcacgcacctgtaatcccagctactcaggaggctgaggtgggaggattggttgagcttgggaggcggaggttgcagtgacccaagatcctgccactacactccagcctgggtgacagagtgagactccgtctcaaaaagaaagaaaaaaaagttggaacaaaatagtacttagtattaatacttaataagtacttagaaaacaaattttaaaattaggtaataaatagctcaaaggaaaagaaattgtagcaaaaaggtgatgaatgtggcccacagtatagggcttggctacgagtatatttgaatagtcataataatagaaacattgaatttatttaatttagaaatgtaaaggaggtgcctatcaaaagaaatcattaatagagttgaaagtagttgtctctagcgagtagaaaattatgatggggagatatgatacaagagattgcagtttttgctataagccttgtagaactatttgtcattttaacaatgaacaatttgataaaaatatgttttttaattgcatttacatttctaacttgtgacaccaggacagcctcccactgatacagcattaacatttattattttttctactcaactacccagatggtgggctttccttatttctgagcctggcttgagttctggggcttggtgttaaggatagctcagctatgaggggtattcatgaaattttgagaaatggaaggcaagacagatacaatatgtggatgggaaggatgaagacagtgtgagaaggataaaagttagcaaggacagggacaggacactctagggcagttggagaagagaaagcaaaagatgctcagagggaaagcctactactctgacagttgaggatatggagaaggatggtagattgagtcagtcaatttaagtgttccagtggcagctggagaagatggccaggtagaaaacaattctcatttttaacaagggagttggcataggagaaaaagttgtgatgaggtcttaggaggaaggacaaagagttagttgtctcaagtaggtaatggatgagcagagataggtgtaagttagttccagggcaggagataataggttttcagaacaatgctcccctttgatctcttactcaccacccccgacccccgcaaccagtttctatcagtgttgatctctatcttgtcatattggaaatgtttaataaatgtagactaaatatagcagagcacattttcccttttcttaccaaatctctggttctcctcaacttttagtactatgttctgtcaccatcatttattggacagttcttcattctagtccactcccataggaatgactttaagactgctgagtctgggaagattctctgttcaaatatttgtccattttcttattgaggatttgttttcttattattgagttttcatagttcttcatattctggtttttctttctttcttttttttttttttttttttttgtagagacggggttccactatgttgctcaggctggtctcaaactcctgggctcagatgatcctctcaccttggcatcccaaagtgctgttattacaggcatgagccactgtgccgagccagttctttacattctggatttcagtccatttgcaaatgttttctccctatctgtagcttgtctttttttttttcttttttctttttttttggatggagtctcactctgtcaccaggctggagttcagtggccgatcttgatcttgattcactgcaacctccacctcctgggttcaagagattcccctgcctcaggttcccaggtagctgagactacaggtgcatgttgccacgcccagctaatttttgtacttttagtagagatggggtttcaccatgttggccaggatggtctctatctcttgacctcgtgatctgcctgcctcggtctcccaaagtgctgggattacaggcatgagccactgcacccagcctatagcttgtcttttaatagtctcttttgaagggacgttttaaattttgctgaagtccaaattatcagtgctattgttttatgaatcttttttagtgttatataaaaaaattctttgcataactcggtgttacagttttctccattttttaaaagaagttttagagttttaggagttacatttagatatatgatgcatttagagttaatttctttacatgatggaaggtatgagtgcaagtttttttattttgtttttttatatggatacctagttgttccagcacattttgtttaaaagactatcctttctccactgaattgcctttacatattggtcaaaaatcagttgcttatctatgtgtgagtctatttccatgctctcttattaaattcctttaatatatttgtgtatgtgtaggctcattgttttttagatgaaataactagaatcaccctttcctcagctagttagcttacaattaatgggttacttatatataaaacttaaattttggctgggcacggtggctcacgcctataatcctagtactttgggaggccgaggcaggtggatcatgaggtcaggagttcaagaccagcctggccaacatggtaaaaccccgtctctactaaaaaaaaaaataaaaaaaaaataattagccaggatggtggcacattcctgtaatcccagctactcgggaggctgaggcaggagaattgcttgaactgggacccgggaggcggaggttgtagtgagccaaaatcgtgctactgcactccaccctgggctatagagtgagactcggtctcaaaaaaaaaaattaaaaaattaaatttttgagccaagaatcacaactgaaccaaactagagaaaaggagtaagttgtaaaactttgaaaaacaacaaaaggggattataacaaatttatcaccatcaaaaatagaatgattgtccaagatcaaattaaaatagtttaaaatattatgcctttttagttgtatgtagaagcagtcttatgttctagtaataatatataactaagcatgtacatttccatacatttcaatttttaggatttcacattgttttgtatcaaaagatttatcaatttttttttcctttattctacaggattaagtttgcaccatggtatggccagttctcttctgagctattcagtcacagactcttatgcagaatacaagagttttgaagagagctttccatcacctgaactgttcagaaaatcagattatttaggtgagaaagtaattccaaccttaaattgctctactatagaaattattcttttgtccacaaatcctccaatgaataaacgtccctttcgagaaggcatactcctcttcctcaccaacacctcacttccctgaccattacccgttgtgtttcattcccagtcacataggactaatagagcaaaagccctcagatcaaggaaggatgaagaaatgtcatttagcatttatatgtaatacacatccaattattaatcaattttgcacctaatgaatgtatacttgttctcttgaaccatgtgttatcttttttttcctgtacttatcttacttttcagcaaataacttaaatgttagctaggccaagtccctgcttgaattttctccacaaattaagagttatttacatttattatacatataaatataacctttggttaatgatggcagatcaaatacatgccttactctacaatcttgcaatggcagaaaacagctttttctttaaagtaatacgctcataaggacaaagataattgaaaaaaagaaagtacaaagtttggaaggttaatcaggtgatctgatacagcagacctaagaaagcggagtcctaaaccaacaatgtgaataccccagaaacaagccaatttgcactatagtgtcacagaaaagctcataatttggttgtgccaaatgcttgtaaatagatgtcaaaaacatgaaagatgtggttaactgctcctttcctgctcaaagggagcctggagatgtattctttagaatattttgaaacagggactctagactggagaatactaggtccttttaatagcagggatactgtggtattttgaaatgtcagtcccaattattcgtttctctgtagtattatattcataccctcgtaatgggtggagtattcttttccactctctggctttgggattggccatgtcacttgctttctgcaacaaacacaatttaagaaaagctttcaaattgcttaaatggttgagcttgtcttcttgcacttttggcattatcatgagaatggaccctaattagcttctgcctctctcgtggaaccccagaatgagagttacagagtggagcagtctaggcaaccagctcacttcagagagctgccccagctgatctgcagatctgtaatctgagttacctgagccaactaatagacatggaaacaaaaaataaatgcttctcactttgtgccactgagattttgtggttgtttattaaacagccaaagcagactgctgcagataatgtactgaatttggaagagggaattaagtaaaagtgtacatcctaaattatgggatctgctcacccaatgcttatttccaccccaccccagcagcccatttttcttgtcagcttcccagacttgaaccttctgctgagaaaatggaagattattttctcaggaactgagtaccccagaagaaaatatctaaagatactgaccccaggagtcctcaatgaaactgaccaggtggaagaccctacagtgaagccaactatgtgacaagccccacctaggccatagggataccacttagccttttaggacccacttctaaatatgaacagagagccaaggatcaccagacttctgaggaaagcctctaacattaaaaagagatatcaaaacaaaacaaaatgtgagaatggtgtcagcaagatgttgaaacaggaagccatggatctgcctactccttatggacacaccaattcaacagcaatatatggaccagttccctttgtgaaaaattcagaaaatagtcgacaggcgcctgcatcctggcaagcatggggccagccacatcaaagccagtaggaaaatttgagacatcctcaccataattcctactcctagcacagcatcatacagttgagaggaaacccataccacagttttcagcttctccctgaggggaagagcaagataagggacttgacaatacatccagtgttctgaattctctgagggatgcctgagggaactgatttcggtcttgcctgtctcagagtgctgataggacccaacatacccaaggtgattggtgactgctgagaacaaagatgacaatttggtctaggacacaaacatttgccataggctctccacctagctcagtgcagagtgagtgggggaaaaaaaaagattccagcttctccctcgggagagaaagagttggactttgtgtccaatgttccaacttttcaagggatgttcttgggactaccttctgtcacacctgtcttacaatgttgacaagatctgacatattgtaaatgcctggaggctgataacaacaaagacggtggtttggactagcacaaagatttgagagatccctgggtaggcttattcataagggtcttctgtacaatgccagactgggagaagtggctgttattttctaatgcgtagatgctgatacaagtaaaattgtcaaggaaaattaagaagcagggaaacatggtcgaaacaaaggaacaagataaatccccagaaactgaccccaatgaaatggagatatacaaattgtctgacaactaattcaaaataatcattaaaaagatgctcaacaagttgagaacaatacatgaaccaaataagaatttcaacaaaaaggaagttttaaaaagaacaaaataggaatttttggagctgaagaatactatcactgaactgaggccaggcacagtggctcatgcctataatcccaatgctttaggaggctgaggtgggaggatcacttgagccaaggagtttgatgttacagtgagctatgattatgctactgcactccagcctggatgacagagcaagactgctctaaaaaaaataaaaaagaataaaagaaaaattcagtagagcaatataacagcacactagctcaagaagaataaagaattagtgagcttgaggacaggtcatttttaaagactccaaaagcaattgcaagaaaaacaaaaattgacaaatgggacctaattaaactgaagagcttctgcacagcaaaataaactatcaacacagtaaacagacaacctacagaatgggagaaaatatttgcaaactatgcatccaacaaagatctaatatccagaatctataagaaatttaaatcagcaagcaaaaaaacgatcctattaaaaaatgggcagaggacatgaatataaagaagactaaagaagtatgtcttcttctcattagagaaatgcaaatcaaaaccacaatgagatagcattgcataccagtcaaggtggctattattaaaaagtcaaaaaataatgtgtttgtgagattgtagagaaaagggaaagcttatacactgctggtacacaggaggaatgggaatgtaaattagtttggccaatgtggaaagaagtttgcagatttctcaaagaacctagaactatcatttgacccaacaatcctattactggatatatttccaaaggaatcattctataaagacacatgaacacatatgtttgttgcagctattttcacaatagcagagacgtggaatcaacctaaatgcccatcagtggtagactggataaagaaagtgtagtacacgtacaccatggaatactacacagaaataaaaaagaatgaaatcatatcttttgcatcagcatggatgcagctagagaccgttatcctaagcaaattaatgcaggaacagaaaaccaaataccatatgttctcataagtgggaactaaacattgagtacacatggacacaaagaagggaacagtagacactggggcttacttgaggttggagggtgggaagagggtgaagattgaaaagctacccattggatactatgctcactatctgggtgacaaaatccatttgtacaccaagccccagtgacacacagttttcccatgtaacaaatgtgcatctgtaccccctatatctaaaataaaaattggaagaaaaataaaggtcatttagcattatgccattagtgaagaaaaaagaatgaaaagattgaagaaatcctaagagacttgtgagccactatcaagcagaccaacatttgcattatgggagtcccagagaagaagagagaaaggactagaaagtgtatttgaagaaatagtggctaaaatcatcccaaatctggggaatgaaatggacatttagatccaggaagcccaagggacccaagtagaaggaagccaagaaatccacactgagaaacagtataaatgagttgtcaaaagtcatatacaaagacagttttgaaagcagcaagtaaaaagtgacttgacatgtacaggggagcccccataaaactatgagtggatttctcagcagaaaccttacagatcagagagaatgggatgatatattcaaagtgctgaaagaaaaattatcaaccaacaacagtacacccaggaaaactgtctttcaaaaatggagagacaaggagtttcccagacaaacaaaagcagagggaatttaccatgactagacctgcctaacaagtaatgctgaaaggaattatttaagttgaaactcaaggatgctaaacagtaacatgaaagtataagactcattggtaaagataaatatatagataaatacagaatacagtaatattgtaatagtagtttactattaagctcttcagtttaattaggtcccatttgtcaatttttgtttttgttgcaattgcttttggagtctttaaaaatgacctgtcctcaagctcactaattatttatagtatactattacaatagtaatgtaatagtaattgtaatactgtacagaatacagtaatactgttatagtagtataccagaattaaatcacttttagttctggtatacgagttaaaagataaaaacgttaaaaactaactgaagatgttaataatacaacataaaatatataaattgtgacatgaataaagtgcaggagggggagaagtataagtgtagtttttgtatgcaattgaaattaagttatcagcttagactgttaacaactatagaagattttacgtaagcccgatggtcaacacaaacaaaattcctatggaagaatcacaaaagaagaaaaagaaaagcattatcgatatatacaaaaagcagtggaacacaaaggcagcactaaaggaaaaagggacaaaagaattacaagacagaaacaattagtgaaatgacaatagttaagtccttacctatcaataattactttaaataagttaaacttcccaatcaaaacacagagtgactgaatggataaaagaacaagacctaatgatgtgatgtctacaagtgaccctctttagattttttttttttttttttttgagacggagttttgctctgtcgcccaggctggagtgcagtggcgcgatctcaactcactgcaagctccgcctcccgggttcatgccattctcctgcctcagcctcccgtgtagctgggactacaggcgcgcgccaccgtgcccggctaatttttgtatttttagtagagacggggtttcaccgtgttagccaggatggtctcgatctcctgacctcgtgatccgcccgtctcggactcccaaagtgctgggattacaggcgtgagccaccgcgcccggccgatcctctttagatttaaggatacatacactaaaaatggagagatggaaaaagatattccatacaaatggtaaccaaaagagaggagggtggctatatttatgtcagacaagatagactttaaatcaaaaacagtcatgagagacaaagaagaacaaaaataataataaaagggtcaattcaccaggaagatatacagttataaatatgtatgcacccaacatcagcatctaaatatataaaacagacattgacagaactgaagggaaaaatagtaatacaataattgtgggataattcagtataacccacttttaacaatggatagaacattcagacagaaaacaggtaagcaaacagcagacttgaacagcgctatagacaacatggacctaacatgtatacaaaacattctacctgacagtggcagaatatatatttctctcatgcacagataggacattctccataatagatcacattatgtcacaaaacaagtcttaacaaatggaagactgaaaacataccaagtatcttttctgaccataatggaacaaaactagaaatcagtagcagaaggaatactggaaaattcacaaatatgtggaaatttaacatactcttgaataaccagtgagtcaaagaagaaatcaaaagggaaattagaaaatatcttcggatgaaagcacaatatattaaaacgtgggatatagcaaaagcagtactgagggaattttataacaataactaaatttaaaaagaaaaatttcaaataagctaatgttacacctcaaggaactagaaaaaaagaatgaacagccaaaaattatcagatagaaggaaataaaatttagagcagaaataaatggaacagaaaattgaaaaaaatagaaagaaatcagtgaaactgagagttggttttttgaaaagacaagtttgacaaacttttagttagattaagaaaagaagactcaataaaattcaaagtgcaagatgagacattatacctgatgccacagaaacaaaaataatcatgagactaccatgcccaattataggacaataaattgaataacctagaaggaaagaagaaattcctagaaacatataacctatgtcatgaagaaatatgaaatctggacagacctataactagtaaggagattgaaccagcaatcaaaaaccttccaacaaagaaaatccaggaccagatggcttcactggtgaattctaccaaacatttaaagagtatttaattctaattcttaaactcttctaaaaaattaaagaggagaagacactttcaaactaattctttaaggccagcattaccctcatactaaagcgaggtaaatactacaagcaaagacaactgtaagacaatatccctgatgaacatagatgtaaaaatcctcaacaaaatactagcaattgaaattcatctctatattaaaaggatcatacaccatgaccaggtggcgtttatctctggaatgcaaggatggttccaaatacaaaaatcaactaaagtgatacactacattaacagaatgaagggtaacaattacacgataatttcagtagatgcagcaaaatgatttgacaaaattcaacatcttttatgatgaaaactctcaaactaggaacagaaggcaattacctcaacataataaagactgtatatgagaagcccatagctaacatcatactcagtagtaaaaaactgaaagcttttcctctaagatcaggaagtatgctgaatacttttattcagcatagtcctagtcacagcaattaggcaacaaaaaaataaaagcgtctaaattgaaaagaagtaaaataatctgtttttgcagatgacatgatcttatatgtaaaacactctaaagacaccacaaggctgggtgtggtggctcacacctgtaccccagcactttaagaggccaaggcgggcagatcacatgagatcaggagtttgagaccagcctggccaaaatggtgaaagcccttctctactaaaaatacaaaaataagccagcatggtggcaggtgcctgtagtcccagctactcaggaggctgaggcaggagaatcactttaacctgggaggcagaggttgcagtgggccgggatcatgccactgcactccagcctgagtgacagagcaagactctgtctcaaaaaaaacaaaaaacaaaaaaaacacaaaaacttatttgaacgattaaatgaatttggtaaaattgtagattataaaatcaacatacgaaaatcagttgtgtttctatatcctagcaataaactacctgaaaaggaaataaaacaatctcatttacaatatcatcaaaaagtataaaatatttaggaataaacttaagaagtagaagatatgtatgctggaaaacaatgatgaataaaatttaaaaagatgcaagcaaatggatgcacatcccatgtttatgagttggaagacttaatattgttaaaatatccatacacccaaagcagtctacaaatttgatgcaatctctatcaaaatctcaatggcattttttaacagaaataacaaagcaaccctgaagtgtatatggaaccacaaagaagctcaaatagccaaaacaatcttgagaagaacaaagtaggaacatcatacttcctgatttcaaaatacattgcaatgctatagtaattcaaacagtatgatactgtcataagagaaatgaatctgtacatatatggccaacttatctttgacaggatggagtgccaagaatacacaatgaggaaaggatactttcttcaacaaatgctattgggaaaactgaatatccacatacaaaataatgaaattggacattgacacccatacacaaaaattaattcaaattggattaaatacttaaatataagaccttaagctgtaaaactcctagaagaaaacataggggaaaagcttcataacattagtcttagcagtgatttcgtggatatgctaccaaaagtataggcaacaagagcagtaacgagtgagacatcatcacttctgcacagcaaaagaaacaatcaacagagtaaagagataacctaccaaaatggaaggaaatatgtataaatcatatatctgataaaggagtaaataattaaaatgcgtaaggaactcttataactgaatagcaaaattaagcaaaaaaaacaacctgattgaaaaaatagacaaatagcttgaatagatatttctccaaagcagcagcagcaatagccagcaagtatatgaaaaaatgctcaacatcattaatcatcaggaacatgcaaatcaaaaccacagtatcacctcacacttgttaaaagggctattaccaaaaaaacaaaaaacaaaagataacaaatgttggcaagggtgtggataaattagaacccttgtacactgttggtgggaatgtaaaatggcacagcagctatagaaacagtatggaggtgtctctaaaaattaaagacagaatgaccatgtggtccatcaatccctgtgtgaatatccaaaataattaaaatcaggatctcaaagagatattagcactcccttattcattgcagcattattcacagtagccgagaggtggaaaaaacctaaatgtttgttgatagatgaatggataaagaaaatgtgatgtataaatacaatggaatattattcagtcttaagaaagaaatcctgcaatttgtgacaacatggatgaaccttgaggacattatgttaaatgaaataagccagtcacagagggtcgaatacttgatatttccacttatatgagttatctaaaagagccaaactcatagaagcagagagtaggatgatgttcgacaggaactggcaggaaaggaaaattgggagttgctatcaatgggtattaagtttcacttacacatgtaggagtgagctctagagagctgctatagaacactgtgcctttagttaacaacactggattgtacacttaaaagtttgagtgtagatctcatgttaagtgttctaactataaaaataattttaaatattaaaatgtttaaacttttaaaattaaaaaaatcttgaaacaaggaaattaagtaggaggaaaaagaatcaaggagaaataggaacaaggagaggaaaatatttttaaaaatcttcattgagataagaaaatatgtattttatccgttaaataagaataggatgctatgaagaagaggctgttctaagaacaatgaagtgcaaaagcagaatggaaaactcagtaaaaggattaaaatattaagttgagatttaccagaaaaaaaaatcataagaaaaaaaggaggaaaaaagaggagaaaataaagaaaaaaaaagattaaaatttagaggaaaaaaatataagatagaagaacagtatatgaaatccaacatcaaataataggagttccaggaaaagataacagaaaaaagggaagaaaattattaagaaataattcaagaacatttttcgagctataaattatgagtttccaggttaaaaggaccatagtgtgcctagtacagtagatgaaaaacaccaaggcacagcattagaaattctaaaacacctgggagtggaataaatggaatggatttatgcaatttggtagcatttgagattaaatagatttaaaaatatagagggaccaggagtggtagcacacacctgtaatcacagcactttgggaggctgaggcaggcggattgcttgaggtcaggagtttgagacaagcctggccaacatggcgaaactgtctctacacaaataaaatattagccgggtgtggtggtggatgcctgtaatcccagctactcaggagtctgaggcaggagaatcacttaaacccaggaaccggaggttgcagtgagccaagatcacaccactgcattctagcctgggcgacagagcaagactcttctcaaaaaagtgtgtgtgtgtgtataaaactaaacagatgaggaaagggacttgtattgactccaggaaaaacaaaaggtggttttgatataccaccagagtaaacagcatttttataacattttatcatcatatgtctatatgaatattgatctaacttaatatatgatataacaatatgggaacgatgggagaggtaggaaaggtggggatgggcgaatatacaggtaatagccttattccatagtgggaagtcactagaaagcttaaaactgatattaagtaatagcagtttacgtacagttgtcccttggtatccatgggggttggttccaagacctcccttggataccaaaatctgtggatgctgaagtccctgatataaaatggcatggtatttgcatgtaacctatgcacatcctcctatatactttaaataatctttagattacttataatacttaatgcaatgtaaatgctatgtaaatagttgttatactgtattgtttagtgaataatgacaagaaaaaaaaaaggctgtatatgttgagtatggatgcaatttttttcctgaatattttcagtccatggttggttgaatccacaaatgtggaactcataaatacaaagggctgactgtatgttatttagtgatgcgatttttaatggcacataggtataacatatataaaatataacaggcagctcacatgtgtgctacctgtctcttagatcaataatccgcatggtagaaaagtctagagaggaaggcagggtaagagaaccagaatagactatagattatttactatattgatccatcaaggcttatttttttctgtctcatccaaaaccttcaaatataataccatcatttagtatgggctgggggcctaaggtggggtagggagtaacccatcatttgtaggctgttgttcaaagtcttacactatttcttctctgctgttttagactgggagtgtcccaacttggaagaacacatgcagtggaagaattctactcttctggataccagtaaagcagtagcgatagagaaggcaccacagttttcaaatgtctcagcaattttcagtgagttgcacacacaggggaacatttctcatctatgttggaaaagcaaagtattttttctcttgaatgatttctaagctaagtctatcagttggattgcctttggctacagataatatctaataatagcataagtatgtatgagtttacttttttatttattttgagatggagtctcactatgttgcccaggctggagtgcggtggcatgatttaggctcactgcaacctctgtctcccaggttcaagcagttctcctgcctcagcctccctagtagctggggttacaggcacgtgccaccacagctagttaatttttgtatttttatagagatggggtttcactatgttggccaggctggtcttgaactcctgacctcaggtgatctgcctgccttggcttcccaaagtgctgggattacaggtgtgagccactgctcccaggcacatcaagctaatttaaacaattttttctagagatggagtctcgctatgttgcccaggctggtctcaaactcctggcctcaagcaattcttctaccttggccttccaaagtgctgagattataggcatgagccattgcactcagtcttttataactttttattttgaactatttttagacttttcatttagtctttctttttttctgtttcatgatcctatcctggatcccatgttgcatttaattgttatttctccctagtctcctgcagtttgtaatacttcctcagtctttcagattactgatgttattttgtagaatgtcccttagttgggatttgtcttgatgtttcctcgtgataggaatgaagttatggctgggtgcagtggctgacacctgtaatcccagcactttgggagactgaggtgggaggactgcttgaggcgaggagtttgagaccagcctgggcaacatagtgagacctctatctctacaaaaaataaaaaatgagccagatgtgatggtgcacgcctgtagtcccagctactcaagaggctgaggtgggagaatgagaggatcgcttgagcccaggaggtcaaggctacagtgagccacgtttgtaccactgaacttctgcctgggtgacagaatgaggatcttctcaaaaaaaaaaaaaaatgaagttatgcagtttttggtaagaataccacagaaatgatgttgtgcctttgcagtgtatcatatcatatcaaagggttcatgatgtccccccatttttatttgaagaatattatgtcttactagtggtgatggtaaatttcatcatttagttaaggtggtatctgctgaatttctccaattaaagattatgttttctctttgtaatttttgaatatctacaaaaagatagtttgagactgtaaactctgtttctcctcaaactttatttcactaattttagcagccatcagaggagccagctgacttcaacctttattactgtggtgtttgtccaagggtgattttttattctgttctttcctgctacttttattaattggaattttactgtaaaagaagaactttctcttttctgccatttgtttgtttatttgattacttattcagtgtagactcatggatatttattctatggtttgaaatccaatattttcatcattcgttcatttatttatttatttctagtatatatgtatagagtagtttcagaagtgttaacccaggctcctgtaagaaacacatttagtaaataaattacagcatttgcatacagttctttttgtctttagcattacagcatccagtcaaaatactaattttccaaagttatgtaagttcattttctccccacctcccttagcatatgagaagttattcacttgtaatatgtatagctagactcatttgttattgattcacttttgcattcacctttcctgtttggttttgtttatgtattcgggaatatgaaatattactatggttttaagagtcatagctatataaaaagttattctcagaaaattgtcactttctccttcttccagctaccattcttctcttctttctacccctttctcacttaacccctatggataactggtctttttagtttttggcttatccttcctgtgtttcttttgtacaaatcaggagatatccatgtatttctttatatcctcttctttgttacatgaagggtaccgtgctatatagctactcttttttcactttgatttttccacctaacagtatgtactggaaatcactccacattggtttacatagagatcttccttttattttttacagctgcatagtactccactctgtggatgtacttttgttgattcaaaaatacctataaattgggtatttaggtttttccccagtattttgccaccatcaacaatactgcaatgaataaacctatgatatatattttcatgttattggcagtgtgtcttcaaggtagatttccagaggtaggatagctgggtcaaaaggtaagtgcatatatcattttattggatattgccaaattttcctccagaaggattataacagtttgcattcccaacagcagtgtgttaaagtgctggtctcactatatccttaccaacagaatgtgttgtcatatttttttttaatttttgctactctaataggtgacaaatggtatctctgtgctattttaacttgcatttccatgattatatgtgagtttaaacatttttcatatgtttaagggccatttttatttgaagaatattggccttttgtctgttgtatatattatgaatattttgtcccagtttgtcagttgtctttttgttcatggtatgttttgtcatgcaaaaattttttattcatactgggtttatgtttctcccataccagcccagagctagtgtagcagttctctaatatcatcaagatcatagggtcttatgtcaacatacaaccaagtgtgttggcttgttccccatagttgcaaggtggttgctaaactctaggtgtcacagccgtgttcctggtagaaagaatgagatagggcaggagtagccccacatgtattcttttattggaagaagaaaagctttcccagaaattcccagctgacttctactttggtctattggccagaactgggtcatgcatctatctaccaccagggaggctgagaaaccaagtattttgctttcctatcctctattgtggtagaaggcaaggaaaatgaagaagaggagtaggaatggatattgtcagcccacctattagagcctgccactaagaaagggtcatattagtcaaagaacattgagttaggggtcctttattggaaagttgatagctgtctggatggccatatttctacagtgtttgaaggccttgtcttctgtgttatgtttagtttggcaactcctttactgaaacaaaattctcaaagaagcaggctgtctctttagcaaatactttggttaggattcttgtccattgcaaatgtcaaaaaatctaacagtattaggttaaaaagggaatttgttaccacgtgtacttgaaaaattcagcaataaatcaggtgcaaatgcaacttgatccagggtttcaaatgatatcggtaggatccatttcctctctatctcttggctcaggatccctctatgtcagttatgctctcagacaagtcccttcttagagcaacttttgctggctgtgggcttacataatcacagcctcaaatacattgaaaaaagtgcttctctttcccaacaatttgaactgaagtcctggaccttacacatgggcttcattagtttatatgccttaccctgaaccagtcactttgtccagcgagatgcagggctctcacagcattgagttataggctatgcctggaccctcgggggaaaaaaaatgaggtgactgttaccagcaaaaacagagtagatgctagatgatgagggtccactgtagccttttatgttttgagaacctccctttgaggaaatgcttaaaggcatcatccactttgtctcctcttaattggtgagatttaaaaattctaatctaacataagtaccacagaaactaaaggttttaatttctttagacaactatacccatggttctttatattcctagtaatatcttaatgtacctgaggcagtcaaatgttggctggcagaaattttcttgactaatcaatctattagtatgcatttctatatatttgatactggactagtatttgactgtgagttttctaatttttttttttttttttttttgagatggagtatcactcttgcccaggctggagtgcagtggcgcaatctcggctcactgcagcctccacctcctggcttcaagcaattctcgtgccccagcctcccaagtagctgggattacaggcatatgctgccacggccggctaatttttgtgtttttagtagagatggggtttcaccatgttgcctgggctggtcttgaacgcctgacctcaggtgatccacctgcctcggtccccaaaagtgttgggattacaggcgtgaaccactgtgcccggcctagttttgtaatttgaccagttatttttttcttatatgtaaaatggggataataaattgatatatttacctgacaggattgttgtaagaatcaagtaagataatacacgtgaaaagacttcaaaaattataaagaactattcaaatacaagggagagattcctgtatctcataaaattttgcagcatttttttactttgatattttgaaaatatttttacctaatttaagtggcagacataaaaacaatatttaaaaagttataaaaatgaactgcacttgggggaaaatattcatttttacctaatttttgccttcgaattatatttctaatagattgtttttattttctctcctaggtacctcttcagaagactatcagaaatgccatagaaaaacgtaagaactaaaaattttaaaattgttgagcttctgaaaccctgtattataatagttatatagcaaatatgattgttagtccacaaactcaggtgttcatttattatttgttgaggactcactatgtgtcaggactgttgtaattgctagagatatagtagtgaacaaaattgattaaaaacgaaatctctgccctcagcaatgatagcaaaaaggaaaagtttgagaaaaattcaagagggatagtcaatagtttttagtgacagattggaagaagttgaaatccaagttggctctcagccctctgacttaggaaattggatgaaaacttgttcactaggtgagggaacacaaatgaaaacacaagagtgggttggggtaatactgaggtaccgacagcactttgaagtggagatgtccaacaacaaattggatggcccagcctggagagcaaggtaaaagtcctgggctgaaggcatagttgtctccttgggaaagaatgtagagtgagaagagagtagcgttagtatgatagcctctttataaatatgcctgtatctaaatggtgagaaatttctgaagaaaagaaaatctgttagctgtttttttgggtgaattgtccttcagtaaatgacagtgacaattgtaaatataaatgactaaggtgaccagagatgatgatggacttgcttaaaaaattccttccacaatttataatgtaatattttcttaaggaggatagaatggtatttggataataatgataccagatttgagtgcctattatctactagacatctggcattctctttatttaagtagcacattcacaaagtaaaacccctacaactttgacttagtagctaatggagacggggttttatttatattgcgataacttctttgtagatccactttaatgactgttgcctatgtattgaaatggagcaaatgtaataaaacacttgattatgtgtatctgagactatttcctgtctcacctaaatactgacctctctttgaaaaataaaacctactacttacatgtgcaaagaaaacatagcttcatttatttttttttttaaataactcatctaaacttctcttaaaccctcatcacccttctcccctatttagctgggaaataatgagttaaacttacttactgtcatccatttacttctggttagaagtcctctttgggtaaatgctgaatctcggattttctccccattccatagtcctgagaatggcatattggtaggtgatcatatccctttatctgcctgggcagtttcagtatatgcctgtttttctgacataattcttaatagagtacccttgtactctcagaaatgttccagtttggacaaatagtcaccctaaatgttaagtgtttaggaataggggcagaccttacgtagccttgtagcagtgctggggaaagggtaaggttgggatctgagggtatctggaatcccataagctgtctctggatttttactgatacatgctgcaaggcttctagactggttctatacctggtctgggctccactgaaaaaatcattgactcataaacttaaggccttatttaggacctgaggtcctccattgctgattttacctcaccttggtttttgttgttttctcaaaccctttgagtctcattgaagtcctatatccagactttgactgggtggctttccacaacctttgtagtagagtcacttcaccacagaacacctatgccaggtgttttggctgtaaatttggccactttcttcattgcccttggtgtatggaaccttgagaacttgttctcaatgcccaggaattaagagaatctcaggagagctaactgatgccccctctctgcctgaacatccccagctcttcttgttatgttgtttccaccctgtatggacatctcctagagttctaaacagggagttagtacatactccctcttcttttgactttctcttcatctcttctaatgtcatcttcccatttattacccctatctgcatatttgggccttgagggagaaaagtcagctcccattgtctgcttgttttctaagtctttgtcccccttctctttctaataatgctctagactggaaggtgtggaggagagatctatctttgttaacttccttagctttttctgtatcatatggttgtcttagtctgttttctgttgcttattacaaaatacctgaaactgggcaattatattataaagaaaaagaattcctttccttccctttccttcccttcccttcccttcccttcccttcccttcccttctcttcccccttccctcttcccccttccccttcccctcccctcccctcccttcctttttctttttcttttctttttctcctctttctctctctttctttctctctctctctccccttccttccatctgtctgtccatccttcttccttccttccttctttcctttctttctttctttttttttttttttgagacagagtcttactctgttgcccaggctggagtgcggtggcaccatcatagctcactgtaacctcgaactcctgggttcaagtgatcctccagcctcagcctcctgagtaaataggactacaggcatgtgccaccatgcctggctaggaatttatttcttacagttatggaggctaagaattctaaggccaaggctgcagttagtgagggccttcttgctgatggggactctctgcagagtcccgaggtggcacagggcatcacatagcaaagggactgaacatggtagctcaggtctctctttttcctcttgtaaagccaatcgtaccattcccatgataacatattaatccattactccattaatccatgaatggcttaatccatttatgaaggcagagccctcatgatccagtcacctcttaaagaccctgtctctcaatactaccacgttggctattaaatttcaacacgaattttggaggggacaaacattcaaaccatagcaatggctaatagtagaactctgtagttgtgttttaacttacatatgttaataggaacttgaggaatgtagcaaaatgttaaatgtggttttcatgttgtcttagagtttggacagtggccttactgatgaacacaaatcgttgacaagtacccccattccttattctgtgtagaattatctatgtggagtttgtaaaaggtgaagtcaaaacccaattctaccagcattagcttattactcatctccaaactaagaaaaggctaagaatacatggagaggatgaaaagtccaagaatgtgtgtttctttgataagagctatatattggtgtcacatggagcgaggagtcttctccctcacctcaacacaagaaaggaagctccaagagaaccatttggaaggttcaacatatgtcactgggagttagtttctgactcatacccggaaggtctaaaggcaaagagggtctgttaggtgctttggaatggcagaataaagaggaagctagatatactttcagagtttgacatgacaaagatttgtgcataatgccaataggccaaatatggattccatagaagggggctaattatgatcatcttgaaagggattatgcccaatatgacttcctgcaaaggatgaagtaacctcactcaaaagcagctggaggttccatcatcaaaggcaaaagctgaggagatgataaaaagcagcaagtgagagagctccggtgataggtagagctccagtgataggtaaacctccaacgaacccttcagaatacttcaagtttaaaagggtccacatttgattatgtgtcatatcccagagataccaatggcacataactatatcagtcaagattgagaaagactttcctgtacatttctaaaactcctttcctataattcactgccagaggaacccaaagtgtagtttccaaataggcaagggaaaagaacaagaaacagagatgaaaccaatggtggttgctcttcccacagcatattctgagtctaaatcatgcccaagctgagaaaaggaaaaaatttaaattgcataaggagagtttggatttgtaatattacactgaactttttgttacctaaaaatagctacttattacaagagaatgccagaaaggtgttagtaaaaagaaatctacctgaaagttcattcagaggcgagaaggtactattttgacaggatacgtttaaaaggaaatatgaaagaataaaattgtttctgtttactgagttcaactattcaattaatcagtgtaggaatttagaaaattcccttctcacatttggttttcaactgcattttcttgctacggactcagaaatcccatttttgtggtcagaggctgagctttgatcctttcttatttattccttttgtgatagctagtcctttcctacacatttagatagaactgggggttgtctagtttgtagaagtacaaaataaaaaaaccccaggatattaatttcaaaaaaaccttttactgcagtctagcctgggtaacagagcaagaccctctctcaataataataataataatataataataataataatcaatctgtcatgtatcttaaaattctttccacaagaatcttaggaaacatgattgctatcccttttgcataaatgaggtaaccaagactcaagacaggctaagtagctttccaaaggccacccaagtgtgagtagtggaactggagtttaaagcaaggtctgtcttattctaaacactatgccctgtcctctacgcatattgtttcacactcataaatgtataaatatattgccttttttattaaactatttgttcatataaataccataacatttttctaagcaactgtatattttcccacaggataattaatctcaaataaatatctttattttaagtattatttgagggtttttgaaagttactgaaggatttagaaaataccactaaacagtttgttcttgttatagagtgatgacagtagcagatcaaaatgtttctccaaaagcaaagtgtgcttcaaattcagaatcaggtaacaaataatgaaactaattattttatgtagtaattgtaatatttatgttaaaacacgattctgtgtttatttttgctacctgcaacatgcattaacaaagttagtagcccagtgaaccgagtactttttagcttggttgtatttaagaaatgaagatatgtgggatcagaaagtgggtcttagctatccccacagcatcaatcatttattcatttaataaacatttaatgaatatgaactccatactagatattgttatatatactagtggaagtgatacacttttcctccccttgtagatttcagttgtaggagaggacaataagtgaacatatattgtagttatgcataatgattgaaaaataaagggataagcaaagtgtcttgcaaacccttatgtagtttactattaggataaatttagcaagacatttacatccttattaacctctgctgtatctcatatttttctatatttcctgcatcaagttttatagcatccatttgagagtaaacttgaagaattgctgattttgctcttgatggttgtaaatgtttgtatgtatatatatttgcataatcttcattttaagaagttatcttaatgagcatttactaaatgccacacattaagttaggaactgtaggtataaaacaattaatatactttctgttctaagcaaaattagtctagtgataaaaactaatcttgtaaaagcacaaaatccttggaaggagcaataccttctaccctggagggttagcattggaagaaggatttgttttacagatcaaagaataagggaatgtgtgaataacagatgagcactaattaaagggaaagtggtaagtgtaccaaaatcaaccatgattttacctaggttttgccaaataaaaagtgttgctttagctgtggaaaatatttacaaagcttggtggtagggcagaatagtgattcttgaattctgtatgtttctgtattcttacttttatatggtaacttaaaatttaaaattaaataagccacttactctagagatttttttttacacatttctttttacaatttttttattattaatatttgtggatacatagatggtgtatatatttatggcttacatgagatattttaatacaggcatgcaatgcataataatcacatcagggtaagtagggtatccatgccctcaagcatttatcctttgtgttacaaataatacagttatactcttttagttatttttaaatgtataattaaattattttttactacagtcatgctgttgtgctagcaaatactaggtcttattcattctttctatttttttgtacccattaaccatccccaccttccctacaaaccactccccctctccaactatccttctcagcctctggtaaccatccttctattctctatctccacgagttcaattgtttttgttttagatcccacaaataagtgagaacaagtgatatttgtccttctgtgcctggtttatttcacttatcataatgaccttcagtttcattcatgttgttgtaaatgacaggatctcattcttttttaaggctgaatagtactccattgtgtttatgtaccacattttctttatccattcatctgttgatggacacttaggttgcttccaaatcttggctgttgtgaatagtgctgaaacaaatgcgggagtgcagatacctctttgatacactgatttccttttgtttgcgtatatactcagcagtaggattgctggatcgtatgatacctctatttttatgttttcgaggaagctccaaacagttctccttagtggttatattaatgtacattcccaccaacagtatacgagggttcccttttctccacatcctcaccggcatgttattgcctgacttttggataaacgccattttaactggggtaagatgatatgacattgtagttttgatttgcatttctctgatgatcagtgatgttgagcaccttttcatagacctgtttgccatttgtatgtcttcttttgagaaatgtctgtttaggtcttttgctcatttttaattggattatcagatttttgtttttcctatagagttgtgtgagctccttatatattctggttattaatccctaattaggtggagtagtttgcaaatatttccccccattctatgggttgtcacttcactttattgattgtttcctttgctgtgcagaagcattttaacttgatgtgatctcatttgtaattttgctttggttgcctgtgtttgtggggtattactcaagatatctttgcccagcccaatgtcctagagactttccccaatgttttcttgtagtagtttcatagtctgaggtcttagatttaagtttttaatccattttaatttgatttttgtatatggcaacagacaagggtctagtttcattctttttcatgtagctatccagttttccaagcaccatgttaaagaaactggcccttccccaaagaatgtccttggcacctttgtaaaaaatgagttcggtgtagatgtatagatttatctatgggttctcttttctgattccttggtctatgtgtctgttttttatgccagtaccatgctgtttgggttactgtagcgccatagtataatttaaagtcacgtaatgtgatttctcagttttgttatttttgctcaggttagctttgactattctggatcttttgtgttccatatagattttagtactttatttgtatgaagaatttcattgatattttgatagggattgcattaaacctacagattgctttgggtagtgtggccatatttacaatattgattctttcagtccatgaacatggaatatctttccaattttttgctgtcttcttcaattttttgcatcagtgtttcatagttttcattgtagagatctttcagatctttggttaagtcccagatattttagtttatttgttgctcttgtaaatggtattactttcttgacttctttttcaggttgttcacagttggcatatgaaaatgccactgatttttatatgttgattttgtatcaagtaactttgctaatttatttatcagttctactagttttttggtggaatctttagtttttcttttaagtataagaccatgtcatctgcaaacaaagataatttgacttcttcctttgcaattcagatgccctttattgctttctcttgtctgactgctctagctagacttccgatactatgttgaataataatggtgaaagtgagcatcgtgtcttcttccaggtttacaaagaaaggctttcagtttttccccatttagtatgatactagctgtaggtctgtcatatattggcttttattatattgaggtatgttccttccgtacctactgttttgagaatttttatcatgaacggatgttgaattttatcacgattttctagcataatttaaatgatcatatggtttttttcctttattctgttgatatgatgtatcatattgattgatttgcataggttgaaccatccttgcgtccctggggtaaatctcacttggtctggaagaatgatctgtttaatatgttgttgaattcagtttgctattttgttgaggatttttacatcagtattcttcagagatattggcctatagttttctttttttgatatgtctttgtctggtttttgtatcagggtaatactgatagcattgaatgagtttgtcagtattccttcatcctctattttttggaacagtttgagtaggattggtattagtacttctttaaatatttggtagaattcaacagtgaagtcactaggtcctggaattttctttaccaggagactttttattatagcttcaatcttgttacttgtattgtcctgttcaggttttggatttatttatttatttattttgagacggagtctcactctgttgcccaggttggagtgcagtggcacaatctcagctcactgcaacctctgactcccgggttcaagtgactctcttgcctcagcctcctgagtagctgggattacaggcgcatgccaccacgcccggctaatttttgtatttttagtagagatggggtttcaccatgttggtcaggctggtctcgaactcctgacttcgtgatccgcccaccttggcctcccaaagtgctgggattacaggcgtgagccacctgcccggctcaaggttttgggttgcttcatggttcagtcatactagattgcatatgtctactggcatgtagttgctcatagtagatactaatgatcctttgaatgtctgcagtatcagttgtaatgtctcccttttcatctctgattttatttaattgggttttctctcttgtttcttagtctggctacaggtttgtcagttttttttttacaagaaaccaattttttgtttcattgcttttttgtattgttttcgaattcatttgtttctgctctgatcttttttttctactaattttgggtttggtttgctcttttttagttcttttagatgcattgttaggttgtttatttgaagtttttattctttttgatataagcatttgtaactgtaaatttccctgttagtactgctttcactgtagcctgtaggttttggtatgttgtatttccattatgatttgtttcaagaatattttcagtttccttcttaattcttcattgactcactagtcattcaggagcatattgtttaattttcatgtgtttgttagtttccaaaattcctcgttattttttatcttttattttagattcaggtgtaaacatatctaatttgttatgtagataaattgtgtgtctgttacagtagtttggtgtgcagattatttcttcatctatgtaataagcatagtacctgataggtactttttcaatagtcaccctcctctcaccctcaagtaggccccagtgtctgttgttccttctttctgtccatatatacccaatgtttaggtcccacttataagtgagactgtgcagtatttggttttctgttcctgtattagtttgcttagaataatggcctccagatttatctgcgttactgctgaggacatattcttattcttttgtatgactgcatggcattccatggtgtatatgtaccacattttttttctctagtctaccattgatgaacatttaggttgattccatgtctttgctattgtgaataatgctgtgataaatatgtgcttgtatgtgtctttatggtagaataagttatattccttagggtatatacccaataatgggattgctgggtcaaatggtagttctgtttttagctgttcgaggaattaccacactgctttccacaatggttgaaataatttacactcccactaacagtatataagcattctgttttctctgcaactttgtcagtatctgttacttttttactttttaataatagtcattctgactagtgtgagatggtatcattgtggttttgatttgcatttctctaatgattagtgatgttgagcatttttgcatgtttgtcggtcgtgtgtatgtcttcttttgaagagtgtctgttcatgtcctttgcccactttttaatggaatggttctttgcttataaatttgtttaaattccttatagattctgatattagacctttgtgagatgtatagttagcaaatattttctcccattctgtagattattgattctgttgatagtttcttttgctgtgcagaagctctttagtttaattgggtcccatttgtcatttttgctctcatagcaatttcttttggcgtcattgttatgaagtctttgccatgtcctttgtccagagtggtatttcctaggttattttccagggttttgatagttttgagtcttagatatacgtctttaatccatcttgagttaatttctgtttatggtgtaaggaagggatctccagtttcagtcttctgcatatggctggccagttatcccagcaccatttatggaatggtcctttccccattgcttgttttggtagatttgtcaaagatctggtggttatgtttgggttctctattttgtttctctattggtctgtgtgtttatccatttcttctaggttttctagcttgtgtgcatagaggtgtttataatagtctctgagagttttttgtatttctgtggggtcagtggtaatgtctcctttgtcatttctaattgtgtttatttggctcttctctttcttttcttaatctagctagtggtctatcagattaattcttttagagaagtagcccctgattcattgatgttttgtatgttttttttcatcttagtttcctttagtctgattttggttatttattgtcttctggtagctttggggttgatttgctcttgtttttctagttcctctagttgcggtattaggttgttaatttgagttatttctgactttttgatgtgagcttttagtgctataaacttccctcttacattgctttggctatgtcccagagagtctggtatgttgtatcttcttcctcattagtttcaaaaaagttattgatttgtgccttaatttcattatttacccagaagtcgttcaggagcaggtttttaaaatttccatttaattgtatggggtttttttcacttctttaaaaattatactttaagttctgggatacatgtgcagaacgtgcaggtttgttacataggtatacacgtggtggtttgctgcacccatcaacccttcacctacattaggtatgtctcctaatgctattcctcccctatcctccaaccccccgacaggccctggtgtgtgatgttcccctccctgtgtccatgtgttctcattgttcaacttataaatgagaacatgtggtgtttggttttctgtttctgtgtcagtttgctgagaatgatggtttccagcttcatccatgtccctgcaaaggacatgaactcatcattttttatggctgcatagtattccatggtgtatatgtgccacattttcttaatccagcctatcattgatgggcatttgggttggttccaagtctttgctattgtgaacagtgctgcaataagcatacgtgtgcatgtgtctttatagtagtatgatttataatcctttgggtatatacccaataatgggattgctggatcaaatagtagttctgattctagatccttgaggaatcgccacactgtctttaatacttttacactattggtgggagtgtaaattagttcaataattgtatgattttgagcaattttcttagcagttatttctatttttattgctctgtggtctgagagagtggttggtatgatttcatttcttttgaaatttgctgaagattcttttgtacctgactttgtgatcagtgtttgccatgtgcatataaggagaatgtgtattctgttggtttggggtggagagttctgtagatatctattagatccatttggtcaagtgttgtgttaaggctctgaatatctttgttagttttctgccttgacaatctgtctgatactgtcagtgggtgtttaaatgtcccattattattctgtggttttctaaatctcttcataggtctctaagaacttgctttatgaatctgggtgctcctgtgttaggtgcatatatatttaggaaagataggtcttcttgttgaattgagccccataatgcccttcttagattatgtaatgcccttctttgtctttttttgatcttggttaaagtctgttttgtccaaaatgagaatagcagcatctgctttttttccgttatttttttgtttttttgtttttttttaattggcttggtagatttttttttcatccctttactttgagtgtgtgagtgtcattgtatgtgagatggatctcttgaagacagcatactgttgggttttgtttctttatccaacttgccactctgtgccttttaattgggagtatttagctcatttacattcaaggttagtattgatatgtgtggatttggtccttttgtcatgttgttagttggttattatgcatacttgtttgtgtggttgctttgtagtgtcacttgtctatgtacttaagtgtgttttttgtagtggctggtaacggtctttcttttccatatttagcactccttttaggaccagttgtaaggcaggtcttgtgctaacaaatttgtctgaaaaggatcttatttctcctttgcttatgaagcttggtttggctggatatgaaattcttggttgaaaattattttcttttataatgctgaatataggcccccattctcttctggcttatggggtttctgctgataggtctgctgttagcctaatgggatttcctttgtaggtgacctgccccttcactctagctgactttaacattttttctttcattttgaccttggagaatctgatgactgtgtgtcttgagactggtcttcttatgtagtattttgcaggggttttctgcttgtcctgaatttgaatgttggcctctctagtgagcttggggaaattttcatggatgatatcttgaaatgttttccaagttgcttggtttctttccttctcttttaggtgtaccaatgactcatagattaggcctctttacataatcacatattttttggaggttttgttcattctttgtcattgtttcttctttatttttatctgagttcttttgtacatccaggcttcaacctctgagattctttcctcagcatggtcaattctactcttaatacttgcgattgcattatgaaattctcagagtgtattttttagctctgttgcatcagttcagttctttcttataatggccattttgtctatcagctctggtatcattttattgtaatccttagattccttggattgggtttcgactttctactgtatgtcgatgatcctcgttcctatccatattctgattcctatttctgtcatttcagccatctcagcatggttaacaatcattgctggggaactagtggggtttttgggaggtaagaagacactctggctttttgaattgccagagtttttgcactggttctttcccatctttgtgggctgatgtttcttcagtctttgaagttgctgtctgtattattcatttttgcattactataaagaaatatctgagaccgggttatttataaagaaaagaggcttaattggctcatggttctgcaggctgtacaggaagcatgatgctgaagctgtacctgtacaggaagcatgatgtacaggaagcaagatgtacaagaaaccatcttcctggtttctggggaggccacaggaaacttcttctttttttttttaaattgagaaagatctcactctgtcacccaggctagagtgcagtgacaccatcttggcttaccacaacctccacctcccaggttcaagtgatcctcccacttcagccttctgagtagctgggaccacaggtgtgcaccaccatacccagctaattttttgtattttagtagagacagggtttcaccgtgttgcccaggctggtctcgaacccctgagctcaagtgatccactcgccttggcctcccaaagttctgggattgcaagcatgagccattgtgcccagcaatctcaggaaacttacagtcatggcagaaggcaaagagggagctggcacttcacatggctggagcaggagaagagagacagggagagggaggaggtactatacacttttaaaggaccagatctcatgagaactcactatcatgataacagcaccaagagggtggtgctaaagcacttatgagaaactacccccatgatctaatcacctttcactaggccccacctccaacattggacccacttctaaatctcatgaccaaacatgagatttggtcaggggcacagatccaaatcatatcactgccctttggatttttttttcttttgccctgtttgatatccttgggggttttcttgttgtataaggtgggttcagtcaactggttttgtttctggaagattttgtggggggccaaggctcagctcaggacctctggattgtgtgctccaattctgtggggctggtatcaggcccctggctttgttctctggccccttgaggtgagaaacctgctcaccaagggccaaggtgttcccagactgctggtcacagcactctgatgagtggtgccagccaaagctcttcacagggcagtggcagtgggatttgtacatgccagcagcagtggcagtgcagcagggtacatacttgttgattatggcagggtgctggcaattgtaggggtaccagtgtccatgcaggtattaacagtggtggggttggcagcatggcacaggggggaacaggccccactggggtccgtgtgcacattcacactggtggcgatgttaggacgaggtgggtgctggcaggtatgggactctgtgtgccatctgtacaggtatccatgcaggcagcagtggccgctcagggtaggggaaggtctgccggtctccctatatagttttgtgccaatggcagtgtcagcacagggacagagcattggtaggtgtgggactgacgccatctgtgcgtgcattcatgtgagtggcagtggccttgcagggtgtggggtaggtctgttggtcaccatgtgcagtttcacgccagtggcagtgtcaacacaagaacagggcactggcaggcatggggctagcagtcttcatgcctgcaaatgcttcgacagcaatggcagcatggtgggtgagtgggtggggtgcacagcaaggtccacccatgcatacatgtgcaagcaaagcggtctaggtgttggacatgggcaaatgtgtgcaggcaaagccgcacaagggaggctgcagcagggggagggcatgggagggctggcgtacatccacagtgtctgctctcctggagctctgtaccagtcaggagcagtctgccagcacaggagctatgatgctgctctcccaggaggcaccccacctgggcatctgaggctacattcaagcaagtgctgccaggctggatccccaggataggcaggccaaccaagaggtgaccaggtagaccagccctatctcatgggcaagactaccctgggctgttcaagtccaacagttcccctagggctaaaatctcctagaggaggaaggcaagccttgggggatgggcgtccttggctatgctccactgcacatgctccaacaccaaaccctccgagatctgcaccagctggagttctgcccctacagaacaagtgtctgtgggggtcatgaggtctcctgccaggattccagaggcccatggtaagggtgggttgctacttgcctgctcaactcaccccttccccaggagtcattggggccaggaatgagtcccagtgcgccttagccctctgcagggttcccagcttctttttcctttagcctagcatctatgtcttccttcactctcaatgccttccctctgaagatctgctaggaattcaccagtcttcccaatgtcccattccctcagcgacagatgttcctcctggctgtgtctagtcagccaacttacctccctcttccctcttgttattgacttgtagttttatttcattgtggtcagagaagatgtttgatattattttagttttttggaatgttttaagacttgttttgtgacctaacatatgaccttgagactgatccatgtgctgaggaaaaaaatgtatattctgaacccattggataaaattttctgcaaatatctattaggtttatttgttctaaataattgaagacaaatgaataagtgaagattaagtccaatgtttctttgttgactttctgtttggaagatctgtccagtgctgaaagtggagtgttgcaatctccagcaatttttgtattagggcctatttttctctttagctgtaatatgtttgctttatatatctggatgacccagtgttaggtgcatatatatttaaaattattacatcttcttgctgaattgacccctttatcattatatataaccttctttgtcttgaaatctgttttgtctgatataaatatagctactcctgctcttttttgacttccattggcatggaatatttctttgcatccctttatttacagtctgtgtgtgtctttataggtgaagtgtgtttcttgaagaaaacagatcactgggtcttgtttttttttttttttttttaaatccattcaaccactctgtgtcttttgattggacagtgtagcccatttacattcagtgttactattgataagtagagacttactcctgacattttgttatttctggttgttttgtggccttctttctttcctttttgtgttcctattaatgaaggtgatttactctagtggtatagtttaatttcttattattttttgtgtatctgttgtatgttttttgatttgaggttactatgaggcttgtaaatactatcttataatccattattttaagctgatcacaacttaacattgtttgcataaacaaacaagtgaaaagaaaactaataaaactacatcttagcttcatctccccactttttaactttttgttgtttttatttatatcttattgcattatgtcttgaaaagttattgtagttattatttttggctagttcatcatttagtctttctaattgagataagagtagaggtcagttccaagatggctgaacaggaacagccccggtctgcagctcccagcgtgatcgacacagaagatgggtaatttctgcatttccaactgaagtacctggttcatctcattgggactgcttggacagtgggtacagcccgtggaaggcaagccgaaggagggcggggcattgccttacccgggaagtgcaaggggtcaggggatttccctttcctagccaagggaagccatgacagactgtacatggaaaaacgggacactcctgcccaaatactgtgcttttcccactgtctcagcaaccgacagaccaggagattctctcccgtgcctcgctcacggggtcccatgcccacggagttttgctcactgctagcgcagcatcctgagattgacctgtgagggtggagcctggcatggggagggccttccgccattgctgaggctagagttggtaaacaaagtggctgggaagctcgaactgggcagagcccaccgcagctcagcaaggcttactgcgtctatagactccacctttgtgggcagggcatagctgaacaaaaggcagcagaaacttctgcagacttaaatgtccctgtctgacagctctgaagagagcagcagttctcccagcacagcgtttgagctctgagaatggacagactgcctcctcaagtgggtccctgacccccgtgtagcctaactgggagacaccttctagtaggggccaatagacacctcatataggcggctgcccctctgggacaaagcttccagaggaaggatcaggcagcaatatttgttgttctgcaatatttgctgttttgcagcatctgctggtgatacccaggcaaatagggtctgaggtggacctccagcaaactccagcagacctgcagctgagggacctgactgttataaggaaaactaacaaacggaaaggaatagcatcaacatcaacgaaaaggacatccacaccaaaaccccatctgtagggcaccaacatcaaagaccaaaggtagataaaaccacaaagatgggaggaaaccagagcagaaaagcagaaaattctaaaaaccagagcacctcttctcctccaaaggatcgcatctcctcgccagcaacagagcaaggctggatggagaatgactttgatgagttgacggaagtaggcttcagagggttggtaataacaaacttctctgagctaaaggagcatgttctaacctattgcaaggaaaaacctatttcaagctaaaaaccttgaaaaaaggttagacgaatggctaactagaataaacagtgtagagaggacctaaaatgacctgatggagctgaaaaccatggcatgaaaacttcatgatgcatgcacgagcttcaatagccgatttcatcaagtggaagaaaggatatcagtgattgaggatcaaattaatgaaataaagcgagaagacaagattagaggaaaaggaatgaaaaggaacaaacaagcctccaagaggcttctgggactatgtgaaaagaccaaatctacgtttgactggtgtacctgaaagtgatggggagaatggaaccaagtgggaaaacactcttcaggatattatccaggagaatttccccaacctagcaaggcaggccaacattcaaattcaggaaatacagagaacaccacaaagatactcctcgagaagttactcctccctaagacacataattgtcagattcaccaagggtgaaatgaaggaaaaaatattaagggcagccagagagaaaggttgggttacccacaaagggaagcccgtcagactaacagtggatctcttggcagaaactctacaagccagaagagagtgagggctaatattcagcactcttaaagaaaagaattttcaacccagaatttcatatccagccaaactaagcttcataagtgaaggagaaataaaatcctttccagacaagcaaatgctgagagattttgtcaccaccaggcctgccttacaagacctcttgaaggaagcatgaaacatggaaaggagcaattgctaccagccactgcaaaaacatgccagattgtaaagaccaccgatgctaggaagaaactgcatcaattaacgggcaaaataaccagctaacatcataatgacaggatcaaattcacacataataatattaaccttaaatgtaaaatgggctaaatgccccaattaaaagacacagattggcaaattggataaagagtcaagacccatcagtgtgctgtattcaggaaacccatctcatgtgcagagaaacacataggctcaaaataaagggatggaggaagatataccaagcaaatggaaagcgagaaaaagcagtagttgcaatcctagtctctgataacacagactttaaaccaacaaagatcaaaagacacaaagaaggccattacataatggtaaagggatcaattcaacaagaaaagctaactatcctaaatatatatgcatccaatacaggagcacccagattcataaagcaagtccttagagacctacaaagagacttagactcccacacaataataatgggagactttaacaccccactgtcaatattagatcagtgagacagaaggttaacaaggatatccaggacttgaactcagctctgcaccaagcagacctaacagccatctacagaactctccaccccaaatcaacagaatttacattcttctcagcaccgcattggacttgttctaaaattgaccacataattggaagtaaagcactcctcagcacatgaaaaagaacagaaatcacacaaactgtctctcagaccacagtgcaatcaaattagaactcatgattaagaaactcactcaaaaccacacaactacatggaaactgaacaacctgctcctgaatgactactgggtaaataacgaaatcaaggcagaaataaagatgttctttgaaactaatgagaacaaagacacaatgtaccagaatctctgggacaaagctaaagcagtatgtagagggcaatttatagcactaaatgcccacaagagaaagcaggagagatccaaaatcgacaccctaacatcacaattaaaagaactagagaagcaagagcaagcaaattcaaaagctagcagaaggcaagaaataactaagatcagagcagaactgaaggagatagagacacaaaaaacccttcaaaaatcagtgaatccaggtgctggttttttgaaaagatcaacaaaattgatagaccactagcaagactaataaagaataaaagagagaagaatcaaatagacacaataaaaaatgataaaggggatatcaccactgatcccagaaatacaaactactatcagaaaataatataaacacctctatgcaaataaactagaaaatctataagaaatggataaattcctggacacatacaccctcccaagactaaaccaggaagaagttgactctctgaatagaccaataacaggcgctgaaattgaggcaattattaatatcctgccaaccaaaaaaagtccaggaccagactgattcccagttgaattctaccagaggtacaaagaggagctggtaccattccttctgaaactattcccatcaatagaaaaagagggaatcctccctaactcattttatgaggccagcatcatcctgataccaaagcctggcagagacacaatgaaaaaagagaattttagaccaatatccctgatgaacatcgatgtgaaaatcctcagtaaaatactgacaaaccaaatccagcagcacatcaagaagcttatccaccatgatccagtgggcttcatccctgaaatgcaaggctggttcaacaaatgcaaatcaataaacgtaatccatcacataaacagaaccaaagacaaaaaccacatgattatctcaacagatgcagaagaggccttcgacaaaattcaacagcccttcatgctaaaaattttcaataaactaggtattcatggaatgtacctcaaaatttatgacaaacctacagccaatatcatactgaatgggcaaaaattggaagcattccctttgaaaactggcccaagacaaggatgtgctctctcaccactcctattcaacatagtgctgaaagttctggccagggcaaccaggcaaaagaaagaaataaagggtattcagttcggaaaagaggaagtaaaatcgtccctgtttgcagatgacatgattgtatatctagaaaaccccatcgtcacaggccaaaatctccttaagctgataggcaacttcagcaaaatctcaggatacaaaatcaatgtgcaaaaatcacaagcattcctatacaccaataacagacaaacagggagccaaatcatgagtgaactcccattcacaattgctacaaagagaataaaatacctaggaatccaacttacaagggatgcaaatgacctcttcaaggagaactacaaaccactgctcaacaaaataaaagaagacacaaacaaatggaagaacattccatgcacatggataggaagaatcaatatcatgaaaatggccatactgcccaaggtaatttatagattcagtgccatcccgatcaagctaccaatgactttcttcacagaattggaaaaaactactttcaagttcatatggaaccaaaaaagagcctgcattgccaagtcaatcctaagccaaaagaacaaagctggaggcatcacactacctgacttcaaactatactacaaggctacagtaaccaaaacagtgtggtactggtaccaaaacagacatgtagaccaatggaacagaacagaggcctcagaaataacaccacacatctacaaccgtctgatttttgacaaacctgagaaaaacaagcaatggggaaaggattccctatttaataaatggtgctgggaaaactggctagccatatgtagaaagctgaaactggatcccttccttacaccttatacaaaaattaattcaagatggattaaagacttaaatgttagacctacaaccataataaccttagaagaaaacctaggcaataccattcgtgacgtagacatgggcaaagacttcatgactaaaacaacaaaagcaatggcaacaaaaacaaaaatagacaaatgggatctaattaaactaaagatctcctgcacagcaaaataaactacaatcagagtgaaggaaactaccatcagagtgaacaggcaacctacagaatgggagaaaatttttgcactctacttatctgacaaagggctaatatcctgaatctgcaaggaacttaaacaaatttatggagtggacccaagatggccgaataggaacagctccagtctgcgggtcccagcatgagcgacgcagaagatgggtgatttctccatttccaattgaggtaccgggttcatctcactggggagtgctggaaagtgggtgcaggacagtgggtgcagcacaccatgcgtgagctgaagcagggcgaggcatcgcctcacccgggaagtgcaaggggtgagagaattccctttcctagtcaaagaaaggggtgacagatggcacctggaatatcgggtcgctcccacgctaatactgcgcttttccaacgggcttcacaaatggcacaccaggagattatatcccccacatggctcagagggtcctacgcccatggagccttgctcattgctagcacagcagtctgagatcaaactgcaaggcaacagcgaggctgggggaggggcgcccaccattcccaagacttgattaggtaaacaaagcggctgggaagctctaactgggtggagcccaccacagctcaaggaggcctgcctgcctctgtaggctccacctctggggacagggcacagacaaacaaaacgcagcagtaacctctgcagacttaaatgcccctgtctgacagcctgacacctcacatggccgcatactcctctgagataaaacttccagaggaacgatcagacagcagcatttgtggttcaccaatatctgctgttctgcagccaccactgctgatacccaggcaaacagggtctggagtgaacctccagcaaactccaacagacctgcagctgagggtcctgactgttagaaggaaaactaacaaacagtaaggacatccgcaccaaaaacccatctgtacgtcaccatcatcaaagaccaaaggtagataaaaccacaaagatggggaaaaaacagagcagaaaaactggaaactctaaaaatcagagcacctctcctcctccaaaggaacgcagctcctcaccagcaatggaacaaagctggacggacaatgactttgacgagttgagagaagaaggcttcagatgatcaaactactccgagctaaaggaagaagttcgaaccaatagcaaagatattaaaaaccttgaagaaaaattagatgaatggataactagaataaccaatgcagagaagtccttaaaagacctgatggagctgaaaaccacggcacaagaactacgtgacgaatgcataagcctcagcagccaatgcaatcaactggaagaacgggtatcagtgatggaagatgaaatgaatgaaatgaagtgagaagagaattttagagaaaaaagaataaaaagaaacgaacaaagcctccaagaaatatgggactatgtgaaaagaccaaattacgtctgattggtgtacctgaaagtgacggggagaatggaaccaagctggaaaacactctgcaggatactattcaggagaacttccccaatctagcaaggcaggtcaacattcacattcaggaaatacagagaacgccacaaagatactcctcgagaagagcaaatccaagacacatagttgtcagattcaccaaagttgaaatgaaggaaaaaatgttaagggcagccagagagaaaggttgggttacccacaaagggacgcccatgagactaacagctgatctcttggcagaaactctacaagccagaagagagtgggggccaatattcaacattcttaaacaaaagaattttcaacccagcatttcatatccagccaaactaagcttcataagtgaaggagaaataaaatcctttacagacaagcaaatgctgagagatgttgtcaccaccaggactgccctaaaagagcttctgagggaagcactgaacacggaaaagaacaaccggtaccatccactgcaaaaacatgccaaattgtaaagaccatcaaagctacgaagatgctgcatcaactaatgagcaaaataaccagctgacatcataatgacaggatcaaattcacacataacaatattaaccttaaatgtaaatgggctaaatgctctaattaaaagacacagactggcaaattggataaagagtcaagacccatcagtgtgctgtattcaggaaacccatctcacatgcagagacacataggctcaaaataaagggatggaggaagatctaccaagcaaatggaaaacaaaaaaaggcaggggttgcaatcctcgtctctgataaaacagactttaaaccaacaaagatcaaaagagacaaaggaggccattacataatggtaaagagatcaattcaacaagaaaagctaactatcctaaatatatatgcatccaatacaggagcacccagattcataaagcaagtccttagtgacctacaaagagacttagattcccacacaataatagtgggagactttaacaacccactgacaacattagacagatcaacaagacagaaagttaacaaggacatacaggaattgaactcagctatgcaccaagcgcacctaatagacatctacagaactcgccaccccaaatcaacagaatatacattcttttcagcaccacaccacacctattccaaaattgaccacatagttggaagtaaaacactcctcagcaaatgtaaaagaacagaaatcataacaaactgtctctcagaccacagtgcaatcaaactagaactcagggttaagaaactcactcaaaaccgctcaactacatggaaactgaacaacctgctcctgaatgactactgggtacataacgaaatgaaggcagaaataaagatgttctttgaaaccaatgagaacaaagacacaaaataccagactctctgggacacatacaaaacagtgtgtagagggaaatttatagcactaaatgcccacaagagaaagcaggaaagatctaaaattgacaccctaacatcacaattaaaagaactagagaggcaagagcaaacacattcaaaagctagaagaaggcaagaaataagtaagatcagagcagcactgaaggaaatagagacacaaaaagcccttcaaaaaatcaatgaatccaggagctggttttttgaaaagatcaacaaaattgatagaccactagcaagactaataaagaagaaaagagagaagaatcaaatagacgcaataaaaaatgacaaaggagatatcatcactgatcccacagaaatacaaactaccatcagagaatactgtaaacacctctatgcaaataaactagaaaatctagaagaaatggataaattcctcgacacataaatggataagttcctcgaccctcccaagactaaaccaggaagaagttgaatctctgagtagaccaataacaggttctgaaattgaggcaataattaatagcttaccaaccaaaaaaagtccaggaccagatggattcacagctgaattctaccagaggtacaaggaggagctggtaccattccttctgaaactattccattcaatagaaaaagagggaatcctccctaaatcattttatgaggccagcatcatcctgataccaaagcctggcagagacacaacaaaaagagagaattttagaccaatatccttcgcaaaaatcctcaataaaatactggcaaactgaatccagcagcacatcaaaaagcttatccaccatgatcaagtgggcttcatccctgggatgcagggctggttcaacatacgaaaatcagtaaacgtaatccagcatataaatagaaccaaagacaaaaaccacatgatgatctcaatagatgcagaaaaggcctttgacaaaattcaacaacccttcttgctaaaaactctcaataaattaggtattgatgggacgtatctcaaaataataaaagctatctatgacaaacccacagccaatatcatactgaatggccaaaaactggaagcattccctttgaaaactggcacaagccaaagatgccctctcgcattactcctattcaacatagtgttggaagttctggtcagggccatcaggcagaagaaggaaataaacggtattcaattaggaaaagaggaagtcaaattgtccctgtttgcagatgacatgattgtatatgtagaaaaccccatcttctcagcccaaaatctccttaagctgataggcaacttcagcaaagtctcaagatacaaaattaatgtgcaaaaatcacaagcattcttatacaccaataacagagaaacagggagccaaatcatgagtgaactcccattcacaatggcttcaaagagaataaaatacctaggaatccaacttacaagggacgtgaaggacctcttcaaggagaactacaaaccactgctcaatgaaataaacgaggatacaaacaaatggaagaacattccatgctcgtgggtaggaagaatcaatatcatgaaagtggccatactgccccaggtaatttatagattcaatgccatccccatcaagctaccaatgactttcttcacagaactggaaaaaactactttcaagttcatatggaaccaaaaaagagcctgcattgccaagtcaatcctaagccaaaagaacaaagctggaggcatcacgctacctaactccaaactatactacaaggctacagtaaccaaaacagcatggtactggtaccaaaacagagatatagaccaatggaacagaacagagccctcagaaataatgccacttatctacaactatctgatgtttgacaaacctgacataaacaagcaatgggaaaaacatttcctatttaataaatggtgctgggaaaactggctagccatatgtagaaagctgaaactggatcccttccttacaccttatacaaaaattaattcaagatggattaaagacttacatgttagacctaaagccataaaaaccctagaagaaaacctaggcaataccattcaggacgtaggcatgggcaaggacttcatgtctaaaacaccagaagcaatggcaacaaacgccaaaattgagaaatgggatctaattaaactaaagagcttctgcacagcaaaagaaactaccatcagagtgaccaggcaacctacagaatggaagaaaagttttgcaatctactcatctgacaaagggctaatatccagaatctacaatgaactcaaacaaatttacaagaaaaaaacaaacaaccccatcaaaaagtgggcgaaggatatgagcagacacttctcaaaagaagacatttatgcagccaacggacacatgaaaaaatgctcatcatcactggccatcagagaaatgcaaatcgaaaccacaatgagataccatctcacaccagttagaatggcgatcattaaaaagtcaggaaacaacaggtgctggagaggatgtggagaaataggaacacttttacactgttggtgggactgtaaactagttcaaccattgtggaagtcagtgtggcgattcctcagggatctagaactagaaataccatttgacccagccatcccattactgggtatatacccaaaggactataaatcatgctgctataaagacacatgcacacgtatgtttattgaggcactattcacaatagcaaagacttggaaccaacccaaatgtccaacgatgatagactggattaagaaaatgtggcgcatatataccatggaatactatgcagccataaaaaatgatgagttcatgtcctttgtagggacatggatgaaactggaaaccatcattctcagcaaactatcacaaggacaaaaaaccaaacaccgcatgttctcactcataggtgggaattgaacagtgagaacacatggacacaggaaggggaacatcacacactggggcctgttgtggggtggggggagggggtgagggatagcattaggagatatacctaatgctaaatgacaagttaatgggtgcagcacaccaacatggcacatgtatacatatgtaacaaacctgcatgttgtgcacatgtaccctaaaacttaaagtataataataataaaataaaaaaaaaacaaatttacaagaaaaaaacccaacaaaaaatgagcaaaggatatgaacagacacttctcaaaagaagacctttatgcaaccaacagacacatgaaataatgctcatcatcgctggtcatcagataaatgcaaatcaaaagcacagtgaattaccatctcacaccagttagaatggtgatcatgaaaaagtcaggaaacaacagatgctagagaggatgtggagaaatatgcttttacactgttggtgggagtgtaaattagttcaaccattgtggaagacagtgtggcaattcctcaaagttctagaactagaaataccatttgacccagtggtccccttactgggtatatacccaaagggttataaatcatgctactataaagacacatgcacacatataaacaatatgtttattgcagcactcttcacaatagcaaagacttggaaccaacctaaatgtccatcaatgatagactggattaagaaaatgtggcacatataccccatggaatactgtgcagccataaaaaagtatgagttcatgtcctttgcaggggcatgggtgaagctggaaaccatcattctcagcaaaccatcacaaggacagaaaaccaaataccgcatgttcttacctataggtgggaattgaacaatgagaacacttggacacatggcgaggaaatcacacactggggcttgtcaggggatggggagctgggggatggatagcattagggtggggggaggggggagggatagcattaggagatatacctaatgtaaatgacgagttgatgggtgcagcaaaccaacatggcacatacctgtgtaacaaacctgcatgttgtgcacatgtaccctagaacttaaagtataataaaaaaataaaaaataaagagataagagtagtttacacaccacaattacactgttataatactttgtgtttttctgtgacctcattattaccaatgagtttcgtaccttcacattatttcttattgctcattcatgtccttttctttgtaaatgaagtattctctttggaatttcttataggacaggtctggcactcatgacatccctcagcttttgtttgtgggaaggtctgtgattctccttggtgcttaaaggatatttttgcctgatatactattgtagagtaaaagttgttttccttcagcactttaaatatgtcatgctgttctcccctggagtgtaggttttccactgaaaagtctgctcctagtgaagctccattgtatgttgtgtttcttttttcttgctgctcttaagatcttttctttatccttgaactttaagactttgattattaaatgccttaaagtagtctttgggttaaatattcttggtgttctataaccttcttgtacttgatattgatatctttctctagatttgggaaattccatgttgttatccctttgaataaactttctgcccctgtctttttctctacctcctgtttaaggccaacaacccttaagatttgccgtttcgaagctattttctagatcttgtaaacatgcttcgttgttttttattcttttttctttggtcttctctatgtatttttaaataacctgtcttcaagctcactaatgctttcttctgctagatcaattctgccattaaaaggctctgatggattcttcaacgtgtcagttgcatttttcaactccagaatttcttatttctttttagttatttaaatttctttgtaaaatttaccagacagaattctgaatttcttctctgtgttattttaaatttctttgaatttcctcaaaacagctattttgcattgtctatctaaaagctcatgtatctccgtttctccaggattggtccctggtgctttacttggttcatttggtgagcctgtttggtgctctacccctctgtggctgagctgttatgttttcctggatagtactgatgcttgtagatgtttgttggtgtctggactctgaagagttagctatttcttgtaagttttgcactctgggcttgtttgtacctgtccttcttaggaagactttccaggtatttgaaaggacttgggtgttgtgatctaaactgtatcttcattaggcggcacccaaagcccagtaacactgtagttcttgcagacttatggaggtaccaccttggtggtcttagataagatctgaaagaattatctggattaccaggcagagactctttttcttttcccttactttctcccatacaaacagaatcaatctcaatctctctctctctctctctctctctctctctctctctctctctctctctctctctctctctctctctctctctctctctctctttcagttctgagtggcctgcagctgggggtggggtaacacaagcacctctgtggcctccaattcccaatactgggactgtgcttggtcagaactaaagccagcacagcactgggtctcacccaaggctcattgtaactaatacctggctattgcctgtgttttctcaaggccctaaggctctgcaaacaacaggtgatgaagccaactaagcttatgtccttccctgcagggtggcaagttcccccagaccctgggcaggtccagagtggctgtccatgagccaggaattagagtgaaaacccttagcagtttacttggttttctgttgtactgtggctgagctggcactcataccatgggacatagtccttcccactcttctctcttctttccacaggcagaggagcctcaccctgcggccacggccaccacaggcccatggggaatactgccagggtacccaccagtgttcctttaaggcccaagggctcttcagtcagcttatggtaaatgctgcctgggactcacccttcagggcagtggactcctctctggcccagggcacatccagaaatgctgtccaagagccaaggcctggaattagggacccccaagagcctgcttggtgctctacccttctgtggctgagctggtatctaaggtgcaagataaaatctcctttacatttccctcacttttctcaggcagagagtctcttcccataaccaccatagctgggaatgtgctgagtgtcacttgcagccagtctcagagtctcacccaagggccatggtatactacctggtatcattgctggttatttagggcccaagggctctttaatcagcaggtgatgaaacctgccaggattgggtcttccttcccttcaaggcagtgggttcccttctggcccagggtgtgtctagaaacgttgtctgggagccagagccttactgctcttcctggtaccctaccctgctgtggctgagctggtatccaagatggaagacaatgtcctctttagtcttttctctcttctcctcaagcaaaaggaaggggtctcttttggagccatgagctgtgcagcctggggttgtgagaggggtggcacaagcactcccttagctgccttggctggtgtcccagtaggtcacatccccgctccccgacaccaccccgccctgcccaccccaagtccactggctctgagcccagttcagcactaggactcgcctgggagttacagtccttgtagcctagactttcaagtttatttagggccccagagcattttattccatagtggcaaggcttgctggaactcaagttctgactgttggaatgggcgatttccctttggctaggtctggtttaaatactccctccatgggtgggcaccagctgagttcagcccagatttgctttccacttgacagggcagcattgagttcagtgcaatgtctcacaatccctttactctccttccaaatgcacagattctgtctacatgccacagggctgctgtggggggatgaaggaggtgtggcattggtgattcaagactgtctttcttaaccttttccagtgcctcttttagcaacatgaagttaaaaccagatactatgagtgctcatctgaattttggttcttatgaaggtgctttttgtatgtagatagttgttaaattggtgtccttgcaggggcaatgatcagtggagtcttctgttcggccatcttgctttgtccttccttatacatttcttaattcaacaaatccagctgtgtttcaaccgtgtgccaggctcttctactaagtgttaagaaattcagaaatggttgtttttcttgctgtcaaggattgtatggtctagtaatagagataaacaaataaacaagaaagtacttctcaagtaactcctgttcagacttgcaatcttaattgccaacatcagtcattaaatgtgggagtttttcaaagttagttcctagattctaatctctttttatcttctgcctgatatatataggtgtcttgtaataggcaggatttccaggttttctcttaacctagactcttctcctctgaggttaagaccattatatgcagctgccttctagatatctcctcttggatattttagaggcatctcaatttagtgttcattaatttagttcattcagcaaatatttattaagcacctaagtatggcataaactgttttagttaccgggaaacatgacagtatccttgccctaatagaacaaatgttacatagtggaaaaaaagataataaacagataaataaatatataacgtcaaatagaaataacagtaactaaggaatataaggtagggtaaagaggtgtaactaggcatgctattttagatagagcaatcaggataggcctctctgaggaggtgagagcctgaataaaattagagagtcagccttgtggaaacctggggggcagagcatgccaggcaatgggaacaataagtgaaaaaaccatgagatgggaatgtgcttggcatgtttgagggagaggaaagaggtcagtgtggctggagcacagtgagcaggaagatgaatggttgaaattgtggtcagagagctaaccaggttgtgtaaagtggagccttgtatactattgtaaggactatggattttattctaaatgtactgagaaatacatcttagatcatcttagagcagagggatgacatgatcagatatatatttttttattttacattttatttcattttaaatgaatttaaatagccccataggtcggtagctacaacacctgacattaccattttaggatattcatatatgttgtagtaagatggaaaataatctaaatataaatctgagaaactactgtgtttcacctattctttctgctttgtccatcactccagaggagcaagctgtaaactggagaaattccaagcttccaagagcccttgagttctatgtgtctgggtccagtgcatctgtggtcctaaggttctaagaggtggtacttttctaagttccaaagactcagattatatattttagaattatcattttggctgttatgtggagaatagattaagagggcgagagtagaagcaaggagaccttattaaactattacagtgatcagataatagtgttttaaaccatgatggtagcagtggtctgatttggaatatattttacaggcagatataccaggaatttgtgattaggctggatattaggtaagagaaaaaaatagaagtcaaggatgaatattaaattcttgagaaattggatgaatgatggtaccatttattgagatgggagcactatagggcagaccaagttgggagaatggttaagataatttttttggacatatcaaatttgatctgtcagcccatacacattaagttttgtgaaagaacacacatgtatatactatataatttcatatatataaagttcaagaacaggcaagactcttctgggtgacatgtcgaaacagtggtagtctttggagaaagggtgccaacgaggaaagaacacatagaaaacttcccaggtgctggaaatattttgtatcttgatctgggtggtagatacatggatgaatacatatataccaagattgtgactgttattatatatatggtatacttcaataaaatctttaaaaactgaaaggcttattagctttcaagtggagatgtcatgaaggcagtttatgatgcaggagtctggagaactccagaccagaggctggggctatggatacgtatttggagtcagcaaagagatgttttgaagccataggatttaatgaaatcatgtaggaggtaaaaataatttttaaaaaacatacacagtgaatggaaatgggacactccaacatttagaggtagggaaagggagaaatatccggcaaaaaaaccctgagacctagtggcttgtgctgtagtaggaaaaccaggaaagaatgatgaagccaggagaggagagtgttttaaggaaggaatgataccagctatgacaaaagttatcaagattatgaaatcaaatgaggattgaggactaacaattgtcacagccaagacctaacctggtcctacactattatcctccatgttggttaacagatgtggtttagcaaaccagaaacctgaaggttatccttaacactttcttttttgtcatttttcaggctaatatctaatctatttccaaatcttggtattagttttatctcctacagagctctcaaacccacctgttgcttcttaccctcaaagacccatatggcaggagtgattagtctctaggattaacagatttagcaaataaagttacagaatacccagttaaatttgaattctaataaacagcaaataatttttaagataagtatgtcctaaatattgctcatgcttgtgctattaaatgtgatatactaaaatattattcagtgtttatttgaaattcacatttaactgggcatagtgtattttatctggcaaccctattagcctctgtagtgaggctgaggaatacataagaaatacacaggtcataaaaagaaggactttgtaatggtacattaaggagcttgagtttaacttgggggcagtagaaagcctttgaagagttttaagcaaacactatttgcattttaagtatacaaggataatggactgcagagggaggtgaattgaaatgctattgaaacctaaagaaaaatcttttggtgccttaattcaaggtagtattgctaagaataaagaaaagctggaccgggtatcatggcttacgcctgtaatcccagtgctttgggaggccgaggcaggcggatcacttgaggtcaggagtttgagaccagcctggccaacatggtgagacccccgtctctacttaaaaaaaaaaaaaaataggccgggcacgttggctcacgcctgtaatcccaacactttgagaggccgaggcgggcagatcacctgaggtcaggagtttgagaccagcctggccaacatggtgaaaccctgtctctactaaaaaaaaaaaaaaaaaatacaaaaattagcctggtgtggtggcaggcacctgtaatcccagctactcgggtggctgagacaggagaatcgcttgaacccgggaggtaggggttgcagtgagcctagatcgcgccactgcactccagcctgggcaacaaagagcaaaactccgtctcaaaaaaaattgtatatatattagctgggcgtggtggtgtgtgcctgtaatctcagctacttgggaggctgaggcaggagaattgcttgaacccgagaggtggagtttgccgtgagcccggatcacgccactgccctccagcctggggaacagagtgagactccatctcaaaaaaagaaaaagaaaagctgaatatgcaattttaaatgcatatgataggcaaaattggcacatagcagacactcaataaatacttgttgcttggattgagtccagagagaggaaaagggaagactcaagactgaagaagagacataaaaaggagccaggttagaaatgttccagcctgttgtagtaaggtccagtgaggtaggacaggaaaggtttctgctgatattggtggaagtgcaactggatactttggatttggaagtaaataggaggagaggaaataaagttggtatatgtggacagatcttttaagaaatttgcctgtgggcaagaggagatacaggggctatagcaggaggtggatatgaggtacaaggaaagtttttgatgaaacaggcttgagaatgtttaaaatgctgatagaaaagttgcagtaaacaggtacactaaaagccgaggcttcgccactgtacaatttttccatataaccaaaaaccacttgtacccctaaagctattgaaatttaaaaaaagaaaaaagaaaaaattgtagtagaaaaagagcttgaaaatgtggagagtggaaatggtaggataatgaatgaagaagtataatcacatgcgactttccctactaactgaaaagaaaatattttacatattttttatttgcttctgtgaaacctggagctcttaagataaggatgtttttattattcaacatacattaatttttcttgtttaattattgacaaaggtgcagtcattaaaatcaggggttttacaaatattattttgttttgtcaaatttgaattctcttgtcctttggactcatagttaatgacagttgaaataagtagaatactgaactatgtttttatttatagataatgcagcttgtgagattttacttgctgagaaaacttgcccttcaacccctgaaaaaacaaagaaaaaagcaagtattgaagcagaataactacataaatcataatacatttcattaataaagaatatacttttaactaacagtttaaatttacttttttttttttttttaagaaatggggtctcattctgtcacccaggttagagttcagtgctgtgatcatagctcactacagccttgaacttctgggctcaagctgttctcctgtttcaaccccctgagtaactggaactacaggcatgcatgcactaccacgccaagctaatttttaaattttttttgtaaagatggggtatcactagttgtccaggctcatctcaaactcatggcctcaagcgatcctaccatctcagcctcccaaagtcctggaattacaggcatgagccactgtacccagccttaaccaatacttttttttttgagacagagtttcactctgtcatccagggtggagtgcagtggcatgatctcggctcactgcaagctctgcctcctgggttcatgccattctcctgcctcagcctcccgagtagctgggactacgggtgcctgccactaggcctggataattttttgtatttttagtagagacagggtttcactgtgttagccaggatggactcgatctcctgacctcgtgatccgcccgcctcggcctccgaaagtgctgggattacaggcgtgagccaccgcgcccagccaaccaatacttttataggaattccttttcagctatttaagtcaataattaaaagcattttgggagtttatcaaatagattattcaatttatggaaaagctatgcagcttataaatgagtatatactctatataagtttaatgaaagagaatgaaaatgtatagtagtcccccctcatctgtgagggatacatcccaagacccccagtggatgtggatagtactgaaccctatatatactacatgtttttgatctgataactgaaacagctactgagtaactaatgagcggatggtatgtctatcatggatatgctggataaagggatgattgatcctagagtggactggactgagggggatggcacacgatttcatcatgctactcagaatggtgtgcaatttaaaacttacagattgtttatttccagaactttccattttatattttggattgtggttgaccacaggtaactgaaactgtggtagacaaaactgtggatgggtgactggggggcagggtgcggggaccagtgtgctttacattttttccaactttcctttgaataatgctgaagattacttatgaatcattacgttaggcatggcatcggggtctttttttgttttcttttgttttttttgaaacaaggtcttcctctgtcacccaggctggagtgcagtggctctctcaccactcactgtaaacttgacctcctcagactcaaatgattctcttgcctcagcctacctagtagctgggactacaggcacacactgccacaaatggctaattttcatatttttggtagagacagggtttcaacatgttgctcaggctggccttgaactcctgggttcaagcgatccacccgcttcaacctcccaaagtgttggtacaggtgtgagccatcatgcccagctggaatctggaggcctttagggaaaaatttggactttattttgtatatagcaagagctactttttgagtagctttcattaattatatattttgtttatggtattccaggcaggttagtagttagtttctgtttgtttgtttttacctacttttttaatcattaaaaaaaattcaactttttattacataattttgctttttttaaaaattttattattattatactttaacttgtaggtacatgtgcacaatgtgcaggtttgttacatatgtatacatgtgccaggttggtgtgctgcacccattaactcctcatttagcattaggtatatctcctaatgctatccctcgccccctccccccaccccacaacaggccccagtgtgtgatgttccccttcctgtgtccatgtgttctcactgttcaattcccacctatgagtgagaacatgcggtgtttggttttttgtccttgcgatagtttgctgagaatgatggtttccagtttcatccatgtccctacaaaggacatgaactcatcattttttatggctgcatagtattccatggtatatatgcgccacattttcttaatccagtctatcatcgttggacatttgggttggttccaagtctttgctattgtgaatagtgcctcaataaacatacgtgtgcatgtgtctttatagcagcatgatttataatcctttgggtatatacccagtaatgggatggctgggtcaaatggtatttctagttctagatccctgaggaatcgccacactgacttccacaatggttgaactagtttacagtcccaccaacagtgtaaaagtgttcctatttctccacatcctctccagcacctgttgtttcctgactttttaatgatcgccattctaactggtgtgagatggtatctcattgtggttttgatttgcatttctctgatgaccagtgatgatgagcattttttcatgtgtccgttggccgcataaatgtcttcttttgagaagtgtctgctcatatccttcgcccactttttgatggggttgtttgtttttttcttgtaaatttgtttgagttcattgtagattctggatattagccctttgtcagatgagtagattgcaaaacttttcttccattctgtaggttgcctggtcactctgatggtagtttcttttgctgtgccgaatctctttagtttaattagatcccatttctcaattttggcgtttgttgccattgcttctggtgttttagacatgaagtccttgcccatgcctacatcctgaatggtattgcctaggttttcttctagggtttttatggctttaggtctaacatgtaagtctttaatccatcttgaattaatttttgtataaggtgtaaggaagggatccattttcagctttctacatatggctagccagttttcccagcaccatttattaaatagcgaatcctttccccattgcttgtttttgtcaggtttgtcaaacatcaggtagttgtagatatgcgacattatttctgagtgctgtgttctgttccataggtctatatctctgttttggtaccagtaccatgctgttttggttactgtagcctggtagtatagtttgaaatcaggtagcatgatccctccagctttgttcttttggcttaagattgacttggcgatgcgggctcttttttggttccgtatgaacttgaaagtagttttttccaattatgtgaagaaagtcattggtagcttgatggggatggcattgaatctataaattacctggggcagtatggccattttcacgatattgattattcctacccatgagcatggaatgttcttccatttgtttgtatcctcttttatttcattgagcagtggtttgtagttctccttgaagaggtccttcacgtcccttgtaagttggattcctaggtattttattctctttgaagccattgtgaatgggagttcactcatgatttggctctctgtttctctgttattggtgtataagaatgcttgtgatttttgtacattgattttgtatcttgagactttgctgaagatgcctatcagcttaaggagattttgggctgagaagatggggttttctagatacacaatcatgtcatctgcaaacagggacaatttgacttcctcttttcctaattgaataccctttatttccttctcctggctgattgccctggccagaacttccaacactatgttgaatcggagtggtaagagaggacatccctgtcttgtgccagttttcaaagggaatgcttccagtttttggccattcagtatgatattggctgtgggtttgtcatagatagctcttattattttgagatacgtcccatcaatacctaatttattgagagtttttagcatgaagtgttgttgaattttgttgaaggccttttctgcatctttgagataatcatgtggtttttgtctttggttctgtttatatgctggattacatttattgattttcgtacgttgaaccagccttgcatcccagggatgaagcccacttgatcatggtggataagctttttgtgtgctgctggattcagtttgccagtattttattgaggatttttgcatcaatgttcatcaaggatactggtctaaaattccctttttttgttgtgtctctgccagactttggtatcaggatgatgctggcctcataaaatgagttagggaggattccctctttttctattgattggaatagtttcagaaggaatggtaccagctcctccttgtacctctggtagaattcggctgtgaatccatctggtcctggacttttttcgttggtaagctattgattattgcctcaatttcagagcctgttattcgtctattcagagattcaacttcttcctggtttagtcttgggacgatgtatgtgtccaggaatttatccatttcttctagattttctagtttatttgcgtagaggtgtttatagtattctctgatggtagtttgtatttctgtgggatcggtggtgatatcccctttatcattttctattgcatctatttgattcttctctcttttcttctttattagtcttgctagcggtctgtcaattttgttgatcttttcaaaaaaccagctcctggattcattaatttttcgaagggtttttttgtgtctctatttccttcagttctgctctgatcttagttatttcttgccttctgctagcttttgaatgtgtttgctctggcttttctagttattttaattgtgatgttagggtgtcaattttagatctttcctgctttctcttgtgggcatttagtgctataaatttccctctacacactgctttgaatatgtcccagagattctggtatgttgtgtctttgttgtcgttggtttcaaagaacatctttatttctgccttgatttcattatttacccagtagtcattcaggagcaggttgttcagtttccatgcagttgagtggttttgagtgagtttcttaatcatgagttctagtttgattgcactgtggtctgagagacagtttgttataatttctgttcttttacatttgctgaggagtgctttacttccaactatgtgttcaattttggaataggtgtggtgctgaaaagactgtatattctgttgatttggggtggagatttctgtagatgtctattaggtccgcttggtgcatagctgagttcaattcctcggtatccttgttaactttctgtctcattgatctgtctaatgttgacagtggggtgttaaagtctcccattattattgtgtgggagtctaagtctctttgtaggtcactaaggacttgctttatgaatctgggtgctcctatattgggtgcatatatatttaggatagttagttcttcttgttgaattgatgcctttaccattatgtaatggcctcctttgtctcttttgatctttgttggtttaaagtctgttttatcagagactaggattacaacccctgcctttttttgttttccatttgcttggtagatcttcctccatccctttattttgagcctatgtgtgtctctgcatgtgagatgggtttcctgaatacagcacactgatgggtcttgactcgttatccaatttgtcagtctgtgtcttttaattggagcatttagtccctttacattcaaagttaatattgttatatgtgaatatgatcctgtcattatgatgtcagctggctattttgctcgttagttgatgcagtttcttcctagccttgatggtctttacaatttggcatgtttttgcagtggctggtaccagttgttcctttccatgtttagtgcttccttcaggagctcttttagggcaggcctggtggtgacaacatctctcagcatttgcttgtctgtaaaggattttatttctccttcacttatgaagcttagtttggctggatatgaaatgctgggttgaaaattcttttctttaagaatgttgaatattggcccccactctcttctggcttgtagagtttctgccgagagatcagctgttagtctgatgggcttccctttgtgggtaacccaacctttctctctggctgcccttaacattttttccttcatttcacccttggtgaatctgacaattatgtgtcttggagttgctcttctcgaggagtatctttgtggtgttctctgtatttcctgaatgtgaatgttggcctgccttgctagattggggaagttctcctggataatatcctgcagagtgttttccagcttggttccattctccccgtcactttcaggtacaccaatcagatgttgatttggtcttttcacatagtcacatatttcttggaagccttgttcatttctttttattattttttctctaaacttctcttctcacttcatttcattcatttcgtcttccatcactgataccctttcttccagttgattgcatcagctactgaggcttgtgcattcgtcacatagttctcgtgccgtggttttcagctccatcaggtcttttaaggacttctctgcattggttattctagttatccattcgtctaattttttttcgaagtttttaacttctttgccattggtttgaacttcctcctttagctcggagtagtttgatcatctgaagccttcttctctcaactcgtcaaagtcattctccgtccagctttgttccgttgctggtgaggagctgcattcctttggaggaggagaggtgctctgatttttagagtttccagtttttctgctctgttttttccccatctttgtggttttatgtacctttggtctttgatgatggtgacgtacggatgggtttttggggtggatgtccttcctgtttgttagttttccttctaacagtcaggaccctcagctgcaggtctgttggagtttgctagaggtccactccagaccctgtttgcctgggtatcagcagtggtggctgcagaacatcggatattggtgaaccgcaaatgctgctgcctgatcgttcctctggaagttttgtctcagaggagtacccggctgtgtgaggtgtcagtccgcccctactggggggtgcctcccagttaggctactcggaggtcagggacccacttgaggaggcagtctacccattctcagatctcaagctgcgtgctgggagaaccactactctcttcaaagctgtcagacagggacatttaagtctgcagaggtcactgctgtctttttgtttgtctgtgccctgtccccagaggtggagcctacagaggcaggcaggcctccttgagctgtggtgggctccacccagttcgagcttcccagccgctttgtttacctaatcaagactcgggaatggcgggcgcccctcccccagcctcgctgtcgccttgcagtttgatctcagtctgctatgctagcaatgagcgagactctgggcgtaggaccctctgagccatgtgcgggatataatctcctggtgtgccgttttttaagccagttgggaaagtgcagtattagggtgggagtgacccaattttccaggtgccgtctgtcacccctttctttgactaggaaagggaattccctgaccccttgtgcttcccgggtgaggtgattccttgccctgcttcggcttgcgcacggtgcactgcacccactgtccggcacccactatctggcacaccccagtgagatgaaccgggtacctcagttggaaatgcagaaatcacccgtcttctgcgtcgctcatgctgggagctgtagacctgagctgttcctattcggccatcttggctcctccttctgtttttacctattttatagctgagaaaactgaggtttagattttcatcagtttcttgaggaggttgtggcaggtctttccggatctaaagcctatactctttctactacactagattgtcactgtaaggaattagagagcaaatagaaaaggggcaagagggtgaatagggagacccattagtagggagttacaaagatttttggtgacctatagtggtggctttgactagggtgtttgataggagagatcaagaaataggcatgtattcaagataattttgcctgtagagttgatcgataggatacaaatgatgaaggaataagaaatgttaagaaagacttctgggtttccgttttgagcatctttagtggataaagatgctatttagtgtgataggaaagacaggtgttctgagaatgcatgaagatggaaatgttgagaaggccattggctatcaatctggaggtcaggggaacagatgtactgtattataatttttttttaagtcgtggaaacgggcgaaatgtcctaggaaatagtatctatagagtaaggaagagaagtgggcccaggtcaatccctggaaaactccatcgtcaggttcaaaaggaagagtggtggagaagaggagaaaaataaacagaacatagtatcatagaaatcaagagaggaaatcatttcacccagaaaaggggaaatggtcaacagtgttgaatgctgcttgaaggtccagtattataaagactttttttgtgtgtgtgtctatgttatttttgattatttacattaaaaatattaattattatgagtgcttaatagctgtatgtctttatggggtacatgtgatgttttgataaaggcacacaaatgcataataatcaaatcagggtaaatgggatatccatcatctcaagagtttattgtttctttgtgttaggaaggaatttaaaagtcaattgtaggacttccagtttccagtgcagcagtgtaagaatcttagaagtcatcactttgtcctaacaacaagtaaagtgctgaaaaaactgaaaagtcaccagtttttcttgagttcatcagagaagtaaggtcatagagaaaactgctgcaccaaatattgaagagacagacaggaggatacagagaatcacaacttaccaaaacagaaacccatgaacagaaacctccatgggaaccattgccagggtaggaaaacctaaacagtgttgatgaattgctggaggctgaatatggacaaatctgagagtcgtaggtggtccccctgccacttttgtgagttttacttccaggagttctgccatcaggtcttcatagtaaatgttagagtaaaatcctctcatgcttctagcagtgggaagagaaaggaactatgtgaaacagaatgcgagaatattcgggtttttttgtttttgtttttgttttttgtaacaaggcctggcctcaggagaaagtatttttcagaacctaacctgctgggggaactatgtggtagacaaactggttctaaagtttatatggagagggaaaagatacagaatagccaactcaatattgaaggagaaaaagtcaaaggactgatactgcctgtatttaagacttactgtaaaggtgcagtaatcaagacagtatgggtttggtaaaagaataaacaaacagatcgatggaacagaatagagagagagcccagaaatagacccatataaatatagtcaactgatctttgacaaaggagcaaaggcaatataatggagaaaagttggtattttctacaaatggtgcttgaataactggacccccaaatgcaaaaacatgaacctagacacagaccttatactcttcacaagaattaatcacaatgggtcatggacctaaatgtaaaatgcaaaactgtaaaccttctagaagataacataggataaaatctaggtgaccttgagtatggtgatgactttttagatacaataccaaaggcacaattataaaagaaataattgataacctggacttcattaaaataaaaaaacttttgctgtatgaaggacaatgtcaagataatgagataacaagccacagattgggagacaatatttgcaaaagacatatctgataaaagattgtaaaccaacatagacaaagaagccttaaaattcaacaataagggccaggcacagtggctcatgcctgtaatcctggcactttgggaggccaaggcaggcagatcacttgagcccatgaatttgagacaagcctgggcaacatttttttttttttttttgtagagacagaatccctgtcgggaggctgagatgggaggatcgcatgagcctgggaggttaaggctgcagtgagccctgaccacacctctgcacactgctgcctaggcaacagagtgataccctgtctcaaaaaataaaaacaacaacaacaacaaaaccaaccaaacaaaaaccctcaagaataagaaaatgaaaaacccagtgaaaaatgggccaaagacctgaacagacacctcactaaagaagatatacaaaaggcaatagtttatgaaaagttgttcaacatcatatgtcattaggcaattggaattgcaaattaaaacaacaatgagtggctgggtgctgtggcttatgcctgtaatcccaacattttgggggactgaggcaagtggattgccttagcccagggttcaagactagcctgggcaacatggcaaaaccctgtctctactaaaaaatattagcctggcatggtgctgcaggcctgtagtcataactactctggaagtgaaggtaggaggatcacctgaatttgggaagtcaaggctgcaatgaactgtgatcatgccactgctctccagcctgggcaacagagtgagactctgtttcaaaaaaaccagaaacagcaacagcgagttattattacacacctattagaatggccaaaatccaaaacactgacaacaccaaatgctggaggatgtgaagcaataggaaatctcattctttgctgctgagaatgcaaaatgatacagtcactttggaaaatggtttcatgatttttaaaaactaaacatactcatatatgatccagcaattacattccttagtgtttatgcaaatgaattgaaaaattgtatccacacaaagtatgcacctgaacgtttatagcaactgttttcataatttccaaaacttggaagcaacgaaaatgttcttcattaggtgaatgcataaataaactgtggtatatccagacaatggaatattatttagcactgaaaaggaattaggtatccagcaatgaaaagacatggaggaaacttaaattcatattactaagtgaaagaagtgactgaaaaggctacatactgtgtgattccaaccatatgatgttctggaaaagcaaaactatgttgacaataaaaagattggtggttgccagaggttaggaggaagggatggatgaataggcagattacagaggaattttaagactgggaaactactttgtatgatattagaatggtgggtacatctcattatacatttgtcaaaacccacagaatatacaacaccaagagtgaacccaaccctaaggtaaactgtggacttttgagataatgatgtgtcagtgtaggttcattcattataataaatagaccactattgtataggatgttgatagcaggagaggctttacatgtatggggactggggatatatgagaagtctatattttctgctcaagtttgctgtgaatccaaaactgacctaaaaaataaaattcattaattttttttaaaaagtcagttgaatttggaatcatgaaggaaactggtgactttggtaggaaaaattttggcagactaaagagaggcaaaccagattagaatgggttgaagaccatggaaagtgaggaagtaacagttatttatagagcttgactctgaagggaaatagagaaaaataatggtaactggatgaatatgcagggttataggaagctttttcttttaagatgagatatactgtatcattgttgaggactaatgggaatgaagaaggggaggaagagaggatagctaaatttaactcaataggcaactagaattctctgtggcctagagatctaattgaacttggcctgaatttcacttctttagccaaaagcaataaaaaaacttccccatcctttctacattttcttttcttcacttcctcatgattacctgtccttctcctgcttccatgcatactgtcagttccatgaattctcccttgctctctcaccttccctccctcctggggctgaagaggcagccacagacagcaatcctattccctcacccccacagaggggcaactgtgcattctcacacactccaaagacaaattccactgcctgctctaggccaaggctcagatgaagccagtccctttcagtttcctgcctatggctgttcccgggggaagcaaccccactcttcccagttgcagggccacagcacagctgctgctgcctccacctgagcattctgccaatggccacagggtcattctgcccctgcatgccaccgccagcatctttacacaccatgagggggcctaaaggcacaacctagcttggctctacctcccctagtacccaaggacactatccaggggtctgaagatcacccagcccggtacaccattggttgcacctgagcactcttcccagggtctgagatcaggctcaatcaacctgccactaccaccacagctggcattcaccagcatgtgccacttgcagatctggaaaccagcctgcccaacccattgtagccatgccaacaccaacacagttgactgagttccagtggattttcctaccactgctactgccattggccatgccatgcacactccacaaggactctagaattcacccacctgcacagcctactgctgccatacctggcacacaagcaagacacctagaggcccaagaattggctacctggatccactaacaccaatgccaggttgtgctgccttggggaccaaggacaggcatgcttaacataccactgctgccactgaggcctgaagaccagtctacttggcatcccagtccccagcaaaacttcatcatagcctccactaacaaccacatgctaagccaccaaggaaatcacagataacactgatgctgtttacagccaaagaaatcatacaaagacagtaatactgcatatgcccagaatcagagcaaatgtgctctagcctaccaacacatatgcacatacacacatcttcagaaaaatgtgcccctgatgaaagcaaattcaaaaaaattggaaaaagcagctgtaacaccagatgcacagatatcaatgtaaggacacaggaaacttgaaaaagcaaggaaatatgacacctgcaaaggtacacaataattctccagcaacagatcctaatacaaaagaaattcatggccgggtgcagtggctcatgcctgtaatcccggcactttgggaggcccaggtgggcggaacacaaggtcaggagatcgagaccattctggctaacatggtgaaaccctgtctctactaaaaatacaaaaaattagccgggcatggtggcgcatgcctgcagtcccagctactcgggaggctgaggcaggagaatggcatgaaccgaggaggcggagcttgcagtgagtggagattgtgccactgcactccagcctgggcgtcagagcatgactccatctaaaaaaaaaaaaaatcacaaaatcccaggaaaaagaattcaaaattttgatactaaagaagcttggtgagatgcaagagaattccaaaaaacaatacaaagaaatcagaaaaaaaattcaggatacaaatgagaaatttaccaaagagatggatattattgaaaaaagaaccaaacagaaattctggaaatgaaggtttcattgaatgaaatacaaaatacactcaaaagattcaacaatagactaaatcaaacagaggaaagaatctcagaacttgaagacagttcttttgacataacccagttaggcaaaaataaagaaaaaattaacaagaatgagcaatgccttcataactatggaacactatcaagtgaccagatattcaaagtgttgatatccctgaaggcaaagagaaaatgaaagggtttgaaaacctatttaatgaaataatagatgaaaaattctcaagtctaacaagagatttaggcatccagatacaggaggctcagtgatttcccagacagatacaacataaaaatgtcttctccatggcatattgtagtcaaactgtctaagtgaaagacagagaattctaaaagcagcaggagaaaagtatctagtcataaaggaaaccccattagactaacagcagactctctcagcagaagccttacaggccaggaaagaatgatatgatatattcaaagtgctgaaagaacaaatctgccagccgaggatactatatacagcaaatttgttcttcaccaatgaaggagaaataaagtatttcccagacaatcaaatgccgagaaaattcattactactaaactcaagggagtcctacaactggtggtgaaatgatgatagttactatcatgaaaacacatgaaactataaaactcacaagtaaagcaaacacacaaaggaggaggagaaaggactcaaatgattctactacagaaaaccaccaaaacatggtgacaaataagagaaaaagaaaggaacaaagagtgtacagatcagaaaacaattaagaatataacaggaacaaagcatgacatatcaatgataaacttgaatgtaaatggattaaattctctacttaaaagatatagactggctgaatgattaaaaaaacatgattcaactatatgctgcctacaagaaatgcactttatctgtaaagaaaaatagagactcaaaggaatggtgaattactccattttcacattgctgataaaaacatacccgagattgggaagaagaaaaggtttaatggacttacagttccacatggctggggaggcctcacaatcatgcagaaggcgaggaggagcaagtcacgtcttacatgggtggtggcaggcagagagagcttgtgcaggcaaactttcattttcaaaaccatcagatctcatgagacgtattcactatcacaagaacggcatggggaagacctgcccccatgattcagttatctctcagagggtccctcccataacatgtgagaattatggaagctacaagatgagatttgggtggggacacagagccaaactatatcaaatagaaaaagatattccatgcaaacagtaaccataactgagcaggagtagttatacttagataaaacagactttaagtcaaaaacagtaaaaaaaaaaaaaaaaaaaaaaaaaaggacaaagaaggtcattatataatgataaaaggatcaatctagaagagcgtgtaacaatactaaatacatatgcacccaacaatgctgcactcagatgtataaagcaaatattgctagatctaaagagagacagaatccaatatagtaatgggggagacttcaacaccccactcactcagcactcaacagatcatctagacagaaaatcaacacataaacattggatttaaactggactttagaccaaatggacctcacagacatatacagaaccttttagccaacaactgcagaatacatattaacgttcttctcatttacacatgggacgttctccaggatagatcctatgttaggccacaaaacaagtctcaacaaacttgaaaaaactgagatcatatcgagtatcttctcaggccacaatggaataaaattagaaatcaataccaagaggaagtttggaaactatacagtacttgaaaacttagcaagatgccgctgaatgatcattggatcaatgaagaaattaagatggaaataaaaaaattcttgaaataaggacaggaacagtggctcatgcttgtaatcccagcacttggggaggctgcagtgggaggatcacttgaggccaggagtttgagaccagcctgggcaacatattgaaaccccgttgtctcctaaaaattttaaaacttagtcaggcatggtggtgcatgtctgtagtcctaactactcaggagtctgaggcaggaggatcatttgagcccaaaagtttgaggctgcagggagctacagtagtgctagtgcactctagcctgggtgacaaagttaagaccttgtcttttaaaaaaaaattcttgaaataaataaaaattgaaatacgaaacaccaaaacgtatggaatatcataaaagcagtgcttagagggaactttatagcaataaatgcctacatcaaaaaagtagtatgtgcttatgtaaatttaatgttatgtaagaaaaaaagtagaatgatttccagtaaagaatttagtgatgcactttaaggaattagagaagcaagaacaaacaaaacccaaaattagcagaagaaaataataatgatcagagcagaaagaaatgaaatagagactaaaaaaatacaaagtatcaatgaaatgaaaagttcgttgttcaaaaagataaaattaataaaccactagctagattaaccaaggaaagaagagaggagacccaaataaacaaaatcaggaatgaaaaaggagacgttactactgataccacagaattagaaaacatcagcagagacttttatgaataactatatactaactagaaaacttggagaaatgggtaaactcctggaaacatacaacctaccaagattgaatgaggaagaaatagaaaatctgaacagaccaataatgagtagtgagattgaatcaataataaaaagtctcccaataaagaaaagcccaggatcagatggattcagtgccaaattctaccaaacatataaagaaaaactaataccagtcttcctcatactatttcaaaaagttgaagaggagggaatcctccctaactcactctttgcggctaacattaccctgattccaaaactaaacaaggacacaacaacaacagcaaagagaaaactacaggcctgatgaacatagacacaaaaatcctcaacaaaatactggcaaactaaatccaacagcacatcaaaaagataaaacaccctgattaagtgggttttataccagggatgcaagaatggtttaacctgtgcaaatcaataaatttgatacatcacattaacagaaccaagaacaaaaactatatgattatttttatagatgcagaaaaagaatttgataaaactgaacatccttcatgacaaaaactctcagcaaactaggcatagaaagaacataccttaaaataataaaggcaatatatgacaaaacccacagctgacatcagactgaatggggaaaagttgaaagcctttcctctaagaacaagacaagaatgcccaccttccccatgcccattaaacatagtaccaaaagttgtagccagagcaatcagccaagaaaaaggaataaaagaggaactcaaattgaccctcttctttgggaactacattattcttttttttttgaagacagagtctctctctgttgcccaggttggagtgcaatggtgcaatcttggctcctgcaacctccacctcccgggtttaagcagttatcctacctcagcctcccaagtagctgggactacaggcatgcaccaccatgcccagctaatgtttgtatttttagtagaaacagggtttcaccatgttggccaggatggtctcgatctcttgacctcatgatccgcccacttcggcctcccaaagtgctgggattacaggcatgaaccactgcacttggcctattcttatttttagaaaaccaaaagactccatcaaaaaactcttagggctgggcatggtggctcatgcctgtaatcacagcactttgggaggccaaggcaggcaatcacttgaggccaagagttggagaccagcctggccaacatggcaaaaccccatgtctgctaaaaaatacaaaaattagctgggcatggtggtgcatgcctgtaatcccagctactcaggaggctgaggcactagaatcacttgagcccaggaggtggaggttgcagtgagccaagattgtgccactgcacttcagcctgagtgacagagcaagactctctctcaaaaaaaaaaaaaaaaaaaaaaaaagccaaacaggctgggcatggtggctcacgcctgtaatcccagcactttgggagcctgaggtgggtggatcatgaggtgaggagttcaagaccagcctggccaagatagtgaaaccccgtctctactaaaaataaaaaaaaaaattatcctggcatggtggtgggtgcctataatcccagctgcttgggaggctgaggcagagaattgcttgaacctgggaggcggaggttgcagtcagccgagatcacaccactgcagtccagtgtgggcaacagagcaagactctgtctcaaaaaacaaacaaacaaaaaaaacaactgttagaactgaaccaaattcagtgaagccgcaggatgcaaacaagcaaaaatcagcatttctatacaccaataatatctgaaaaaaaatcaagaaggcaatcacatttacaacagctgcaaaacaaaccaacaaaaccaaaaaaaaaaaaaaaaactaggcataaatttaaccaagaagtgaaagatctctacaaggaaaattacaaaacactgatgaaagaaattgaagaagaaacaagacatctcatgctcatggatcagaagaattcatatcattagacatgaccatactacctaaagcaatctatagattcagtgcaatctctaactacatatcaatgtagtttttcacagaactagaaaaaacaacgctaaaattcatatggaaccaaaaaagatccagaatagtcaaagcagtcctaagcaaaaggaacaagctcaaggcactacactacctgacttcaaaatatattacaaggctgtgctaacccaaacagcatgatattggtagaaaaatagacacagagaccaaaggaaaagaatagagaacccaggaatgaatccacgtatttacagccaactgatcttcaacaaagccatcaagaacatacacgggggaaaggacagtctctccagtaaacgatgctcagaaaactggatatccccatgcagaagaatgaaactagacccctattcctcacctttattaggctgttcttgtgttgtgatttaaaaaaatacctaagactgggtaatttataagaaaagagatttaattgactcacagttctgcagcttgtacaggaaacatggcagcatctgcttctggggaggcctcagggagcttttactcatggtggaaggcaaagcaggaacaggcacttcatatggcaaaagcaggaacaaaagagaaagggtgggagagatgctatacttttaaacaaccagatcttgtaagaactcactctatcaagagaacagcactaaggggatggtgctaagccattccagagaaatctatccccattatccaataacctcccaccaggccccacctccatcattggggatttcaattcaacatgagatttggatgggaacacatattcacactacatcatcactgtctaccaaaatcaactcaaaatggattaaagacttaagcatactggaactggactccttccttacacctgaatagtattccatggtgtatatgtaccacattttctttatccagtctaccattgatgggcatttagattgattccatgtctttgctatgtgaatagtgctgcattgaacatacgtgtgcaggtgtctttatggtagaatgatttatattcctttgagtatatacccaataatggtattgctgagtcgagtggtagttctgcgttgagttctttgagaaatcaccaaattgctttccaccgtggctgaactaatttatattcccaccagcagtggataagcattccccttttctccacaatcttgctagcatctattagtttttgacttttttaataagtcattctgactggtgtgagatggtatttcattgtggttttgatttgcatttatctaatgattagtggtgagcattttttcatacgcttgttggctgtgcatatatcttcttttgataatgtctgtttatgcctttgcccactttttaatggagctgtttggtttttgcttgtaaatttaagttccttatatatcctggatatcagacctttgtcggatgcatagtttgcaaatattttctcccattttgtaggttgtctgtttactctcttgatagtttcatttgctgtgcggaagctcttttgtttaattaggtcccatttgtcaatttttgtttttgttgcatttgcttttggcatcttcctcatgaaatctttgccagggtctatgttcagaatggtattttgttggttttctcctagagtttttatagttttaggtcttacatttaagtgtttagtccatcttgatttttgtatatggtataaggaaggagttcagtttcagtcttctgaatatggctggccagttatcccagcaccatttcttgaataaaacagtcctttccccattgcttgtttttgtcagctttgtcgaagatcagatggttgtaggtgtgcagctttatttctgggctctctattctgttccattggtctatgtgtctgttaagtttgtttgaggaagattttagagggccagagctcagctcagcattcctagtttgactgctctaactctaagggtgctggtaccaggcccccagctttgttctctggtctcaggagcttaggaactcgctgcactggaggggcccggtgttcctgctctgctggccacagcactgtgatggggagtgctggccagtgcctttcctcaggcagtggcatagcatagcaggatctatgctagcttgagtgtggcagcagcagcagtggtgggctggggtgaacagttgctggcgggagtgaggcactggattctgtacacaccctcatgcaggccacattggcagggcagagtgccgcacattagcggtggcagggtgtgctcacaccagcagtggtggagaggcagggtgcatgtacacacacatgccagtgggagagaggaagtatggtcacctgcgcttgcgggccagcaaagcagtggagaggaccttgggcgagtgcatgacagcaaagtgaggtggaggaaggctgtaagggagtggaggctgtaggtaggcaggtgcgcatccatggtggctggtcagcgggagctctctgacggtgaggcatggtctgctagtgaaggagctatgagaagggcccctgggaagcaccctggttaggcatgcgaggctgtgccacaagcgggcatgccatgctggggccccaggagaggctggcagatgaggacactcagatcggactggacatatctcatggacaagactgccctactctgtccaggtcctacagttacccaaaagctaaagccacctagaagagtatggcgagccttggaggatgggcatccctggccatcctgctccacctgtgtttcgaactattttgtctttcagcagattttttaacttaaatgtgtgacgttatttttttccagaaaatcatttatttctaagtttaaatctttttttcaagttgaaataataggacatgtgagaagtgctggaaatgtttttatagcactataaaatgtatttcttgattatgaatttgtttcagcctggaaaagattctgaacatagagttacaaattttcagttaaactctcattatctaaaagtcaaggttccgtcttcccactataggtctgcttttatgttaaatgatgagttaatggctgcagcacaccaacatggcacatgtatacatatgtaactaacctgcacgttgtgcacatgtaccctaaaacttaaagtataataaaaataaataaataaataaaaagaaaaaaaaaagaaagcaatgcaggtagaacagtttagttctgctgcctcagtccccaaaacctgcattgataagaactagtcttttattaactaatattttttgaaaagactataaatatgtactgattgggaagatttagaaatatatatatatatattttaacaaatctaagaaaaaatgtagggaagctatatacttacagctgcatacaagctgatgttttaaaattggactgatagttgacaattatgtcaaatgagacctctgggaagcagatactcagacagtataaagagttcaaacatcaggggctaatgactaagaaaggaaggcagggaagaagcaggattatgcagggatagccccagtcttcagtgcagatctgacagaagctctcaacaatggggagttctggagaaaagattgtctattatgaaagtcttgtgttggactgttatgcccagacattggctgggggctgcttgaaaagatggtggcctcagcatgaaagctgaagcatattctaaagatgttgtgcttgggggctgtcagctaactacactccttgcactggaacagctggttctttgtttgaagaaatgtgagcagaggaccttcaggactgccacaatgatgatgataatagttatcattgagtagctcctactctccagacaccataggttctttttacatatattatttgtaacccttgcatcacagtccctagaggtagaataaccttcattgttgaaatgcgaaaactaaatatagctagtaagttagaggctgatgtgttcattttattgtaaatatacccataaacatttctgacaaaaattttcctaataaactattccagattatgtcttgtaccaacgatcagtttaaaagcttttaagccagaagggaaagaaaggttgaaagtaagattccagacttgacatcttacaagagacacctactcaaaaagaacatttatcagaaggatatggttgcttcatggagtctaaaggccgaaaaggcagctgatttctagaaataaagctgcctgtctctgtctgtttgactatcactcttactttctactctacctttctacccgtttctttgcttttgctatcctagattttctctctcttgcagtctcaagctctgtctcttttccttggtctctgtcttgatctctctcactgtccttctctgtctctctctctcaatctctgctcacaatctatgttggtttctgtcttctctgtctttctcttttttcctctctccttctcttggtcttcctctttttctctccttctctgtcttttgcttttcattcttcctctcctacctcctctcctctcctctacctcttccttcatctcctctccattcccctcttctcccttcctccctctctctcttttggcctgtcgcttcctcgctttctgtcactttctttaggtcttgtatcttgtctgtttctctcctcactctgtcttttactctttcttgctttgtctacctgtctgtctgtctgcctctttgtatcttcaaaaagtagaaaatgagcctacatcctactttataatttctttaactttgatgttccataaatgaaagtatctatatacatttaacgttatatattttaaaccaattatccttgctacatatatttcacagctccagaaataacttatactttctttccacaaaaagtacaataatatactaagaattaaatgctgaaagtaaaatacctttcttagtagttaacaaagataactgaagcgccatttcctaactcaacactctaattagcttttctttctaaattaatagtaatttcaaccaaggtattcatttcaaccaaggtattctcatatagttgctatgccatatagagttctcttggatgttgtttgatctagctcaagtgagaaaattctttagtttcctgtgaagtggtttaaaatttaatgaacagattaaggattttcttagtactgtacattatgatctggtcaactaacttgaaattgtagttttactatactaaaatagtttatttctttctgctgttcaatccctgttttataaaaacatttatagaaaacaaattccagtactcctggtaagaaaaacagaggccttttaacaagtactccatcttcagagacagctggttttgtggtaagtattagcatttggcacttgtagtatctgttttctggctcctcctctccccattcttctatttttctcatatcagggaaatattgcctatggagaataatatctgtgtttttctgttgcttaagcacactttcaatgaaagtactttgtatactactatacatgcaagagagaaggaaaaattagagtactgcagcaacaaccaggattcttctgttttttcctttcagttttaaaaattgtgatgaaatatatataacataaaatttataattttaaccatttttaagtgtacagttgaagtatattcattcacatcattatgcaaccatcaccactattcatctctagaacttttttcatcttgcaaaactgaaattccatatgcattaaacagtaacttcctgctcctccctaccccacccctggaaaccaccattttactttctgtttctataaatttgactactctaggtacctcatataagtggaaccatacagtatttgtcctttgtgactagtttatgtcacttagcatggcatcttcaaattcatctatgttacagcatgcatcagaattttatttttaaggatgaattgatactccattgtatgtatatgacacattttgtttatccattcatctattgatggacaattgggttgcttctgccttttgacaattgtgaataatgctgctatgaacatgggtgtacaaatatatgtttgagtccctgctttcaattctttgggtatgtatctagaagtggaattgctacagcatattgtaattcaatttttctttttgaggaaccaccacactgttttccttagtagctgtaccattttacattcccactagcaaaatgcacaagggttccagtttctctacttccttgccagcacttgttattttcttttttgtaatagtagttcttatggatgtgaggtggtatctcattatggttttgatttgtatttccctaataaggatgacactgagcatcttttaatgtgttaattagctatttgtatatcttttttgggaaaatatctattcaagtcctttgtttatttttgaatttttaattgttgagttgtaggagttcttcatatatctgagatgttaacccattacccaacatatgatttacaaataatttgcccccttccatgggttgccttttcactctgttgatagtgtcctttgatgcacaaatgttttttattttgtcatagtaaaatttgtctttttcttttctcacctgttcttttgatgtcatatccaagaaatgattatcaaatccagtgtcatcaagtcttcagtcaaatatccaatgttcctcttcagtgtgagcaatcctcacagaggtccatgcagcggcttacatagcagtgtggggactgctcaggcacaaggagatgaaatccagtatcttttgtaacagcacttatgcataacgtccatggtctccacaaaggacatgtgtaattacaatgtccctgcactcagggaaactcaaagtattttagcttttatagtgcagtagttatttatttatagtgcatttatagttcctcctatagatacaattttccaatcagacattatttttaccataagcaatgttacctagtaacacagttgacattcttacacttatcaggttcctaggggaaaggagttacagatttaaccaatagatgctcatgatgggagaaaggattttgttaatcctctgctcacagtctttccagtggcccaaaaatcaatactttttccagaaaatgagtgtctcattttttattcattcttggttgatatttggagttaaaatgtattgatgaataacaaatgtaccaaaatgatttttttcgtggcaaaactaatttagtgactattttacaaatatcaacatatttttaaatttgaggtacaagttacgttttataaaactcagtatactaaagtatataattcagtggtttttagcatacttaaaaactgtgcaactatcatcatgatcctatttaagaacattttcatcaccctattcgttaatagtcagccctcatccccccatcccaccctccagtccaaagaaactactgatttagtttctgtctctataggtttgctctttctgagtatttcatataaatgagatcatataacatgtggcgttttgtgcctggtttctttcacttagcataatgttttaaaaattcatctatgttatagcaggtatcagtactgcattccttttttatgacctatgtattagtctgtttccacactgctataaagacatacccaagactgggtaacttataaagaaaagaggttcaattggctcacagttccgcatggctggggaggcctcaggaaacttacaatcatggtggaaggggaagaggcctgtcttacatggcaacagaggagagagcatggaagagcagggaaaactaccctataaaaccatcagatctcgggaaaactcactcactatcatcagaacagtatggagaaaaccacccccatgattcaatcacctcacaccgggtccctcccttgacctatggggattatggggattacaattcaagatgagatttgagtagagacacagccaaaccaaatcaactgaattatactccattatatacatataccatattttgtttatcaattcagtttatgcgcatttatttccatttattatctattatgaataatactgttatgaacatttgttgacaagtgtttgttaaacatgttttcagttgtcttaactatatacagtcatccctcagtattcatggggaattggttccaggacttctcaaagataccaaaatatgtggatgctaaagttcctgatgtaaaatggcatagtgttggttttttgcatataacctacgtgcatcctgcacaccttaaatcatctctaaatcaatcagtcatcttttttggaaatttttaatttggtacagaaatgtgtggtgatttcagtaacctgatagaaaaatggatatggcacttaggagagagttctatgttagagatagtgatttaaaaatctctggtgtatcatagcaaacaaaaattcctaattaaaaaattactttaaaatgaaagaatgttataacccattttacagattgatttgtctctaaacatgcatcttttgaagagttatgtccaaatgtcagtaattacgtttattcagatgaaattgttcctgtgtcaagtttacaggaaaatgcttccaatgagatggtatttttcaacttttctttaattacttaaaaatcattgcttttgcaatgtttaacttccacaaaacaataatgtattcttttatagattgatttgtcctcagtgcaaaaagcatcttttgaagaactatttccaaatgtcagcaattatgttaattcaaatgaaattgttcctgtgtcaagtttgcaggaaaattcttcaaatgaggtagtattttccatttttccttcaattactaaaggaaataattactgttacattagatactttgtatatgaggtgctataagaaatctcttaactcatgagaaacataatttgcaaatattttctcctattctgtgggttgcctttttacactttggttagggtctttgatgcacaaaattgtatattttttatgaagtacagtttgtctattttttcttttcttgctcattcctttggtgtcctgtgcaagaaatcacagccaaatcaaatgtctaaagctttttgcctttttcttttcttttctttctttttttttgacagagtctcactctgtcctctctgctggagtgccagggtgcagtcaaggctcacagactcactgcagccttgacttccaggatttaggtgattctgccatctcagcctctcgaatagctaggactgcaggcatacaccaccatgcccagctaattttttgtattttttgtagagactgggtttcgttatggtgcccaggctattgccctgtattttcttcaatttttttttgttttaggtcttgtatttaggtcattgatccattttgagttaatttttgtgtatagtattaggtaagggtccagcttcattcttttgcatgtagatatccagttttctcagcatcatttgttgaagagatcatcctttcccccattgaatggtctggcccccttgccaaaaatcatttaaccatatatgtgagggtttattcctgagttctctattccattgatctatatgtctgtctttatgttagtaccatatggctttgattactgtagctttgtacattttgaaatcaggaagtgtcagtcctccagctttgttcttctttttcatttttgtttttactattcaggatcccttgagattccatgtgaattttaaagtgggtttttctgtttctgcaataaacatcattggggttttgatagagattgaatggaatctgtagatcaccctaggtagtaatggcatcttaacagtattgcatcttccaatccataaacatgggatgtgttttcatttatttatgttttctttaatttattttaccaatgttttatagtttttattgtgtaggtctttgacttatttggttaattcctaaatattcttttggatgctattatgaattgaattgtaatttattttctttttttttgttttttttggtaatttcttttcaaattgcttatgttagtgtgtagaaattcacctgatttttgtgtattgactttgtgtcctgttaatttgctgaattcatttattctaataatttttaattcaatctttaaggttttccacagtgataccatgttgtctgtgaacagagataattttacttcttgctttacaatttggatgccttttatttcttttcctaatcgcctaattgctccggctagaactatcagtagtatgttgaaaatgcagacatccttgcctttttcttcatcttagaggaaaagctttccatctttcaccattgaatgtgatgtttactgtgggttttcatatatggctgtattcgttcattttcacattgctataaagaaatacctgagactgggtaatttataaagaaaagaggtttctttatatatataaagaaaagaggtttctttatatatataaagaaaagaggtttctttatatatataaagaaaagaggtttctttatatatataaagaaaagaggtttctttatatatataaagaaaagaggtttctttatatatataaagaaaagaggtttctttatatatataaagaaaagaggtttctttatatatataaagaaaagaggtttctttatatatataaagaaaagaggtttctttatatatataaagaaaagaggttccaattatggtgaaaggcaaaaggggagcaaggcatcttacatggccagagcaggaggaagagagaaaatggggaggtgccacacacttttaaacaacaagatctcacaataactcccccactagaacagcaacaagggcatggtgctaaacaattggggaccacccctgtgaagtaccactcccatgatccagtcacctcccaccagggcccacctccaacattggggattacaatttcacatgagatttgggcagggacacaaatccaaaccgtatcaatggcttttattttgttgaagtagtttccttcaattcctagtttattgtttttatcacaaaatggtattgaattttgtcaaatgctttttcagcatcagttgagaagatcagttgttttttcctttcattctactatatgtggtatattacagtgattgattttttttaagtctcgccaaattaagcagaaacattgattggcttttgtatgttgaaccatccttgcattccacgaataaaacccatttagttgtggcctataataattttaatatgctgctgaatttggtttgctagtaatttgttgaggatttttcttcaatgttctagtggatattggcctgtagttttcttttcatgtattgtccagaaaagacactttgtttgactttgggtaatgttggtctcatagaatgagttacaaatcattcctttctcttcttggaaagttagagaagtattggttttagttctttaaatgtttggtagaattcaccagggaaggcatcagaattagggcttttccttgttgggagttttttcattactgattcaatctccctactagttctgtaggtatattctggttttctatttctgcatgatttagtattgagaggctttgtgtttataggtatttgtttatttcatctaggttatcaaatttgttgatatacaattgttcataatactctctttgtaattctctttttggtagaattggcagtaatgtcaccactttcatttctgactttagtaatttaagtcttctttccctttttattagtattttttcattaaaggtttgccagttttgttgctattttcaaagaaccaattttggtttgattgattttccttatgattttctattctctattttgtttctgtctgctctaatctttattatttccatccttctgctagctttgggtttagatggttcttcttttctagttccttaagttgtaaagttaggttgttgatttgagacatttcttgtttttcaatttaagcatttatagccataaatttccctttaagcactgctttcactaaatcccgtaagtttggttatgttgtggttttgttttcatttgtctctaagtattttctaatttcccttgtgatttctactttggcccattggtgtttaagagtatgttgtttaattttcacagtttgttgaatttttcagtttcacaaactctggttttttttaatgacttcattctattttggtcagacaaaatactttgtatgatatctatcttttaaaatatactgagacttaatttatggcctgatacctggtctatcctgtaaaatatcccatgtgcacttgagaagaatatatatgctgttatttgaaagattgttttgtatatatgttacacttaattgattgtaagtcctctattttcatattctcttctgcctggttattctatcaattattgagagagaggtattgaagtcttcaactattattatagaactgtctatttttcccttcagttctgtcagtttttacttcatatattttgatggtctgtcattcactgtgtaaatgtttataattgttatatgttcttgctatcttgagtcttttattaatatataatattcatctttgtctcttataaccttttgattgaaactttatctgatattattatagctgcccctgctctcttttgttactatttacatggagtagctttttctgtttcacttttaatttatttatgtctttggatctaaagtgagtctcttataaacaacatatagcatatgttttttatccattttgccaatcccagtttttctatgggagaatttaatttgtttatttaaaatacttactgataaggacagacttatttttgtcattttgctcattgttctctatatgcctttatctttttttgtccttcactttctacattactgtcttcttttgtggttaattgattttttgtagtgaaatatttgaatttatttcttatttccttttgtgtatattctatagctattttctttgtggttaccagagggattacctttagcagtctgaagttatgatactctaatttgaatttatttagcagtctaaagttatgatactctaattagaatttatggttaacttcaatgacatacaaaaactttgcccctttacttcacccctttcagatgatgatgttaacatttttatacatcatgtgccttaaaacataaattaataatttttttgagatggaaactcattctattgcccaggctgagtgtagtggcatgatcatgactcactgcaacctccacctcccaggctcaagcagtcctcccagtttggcttcctgagtaggtgggactgcaggcatgcacaaccacgtccagctaatttttgtattttttgtagagacagggttttgtcatgtttgtcaggctggcctccaactcctgggcctaagcagtctgcctgcagctgagattacaggtgtcagccaccatgcccagtcaataatacttttaaacactttagtcttttaaattatgaaaataaaatatgagttacaaaccaatgttacaataatactagctcttataccaataattattttttaaatttattagtctcttaaatcatatagaaaacaagaagtagagttataaattgttgttataataatagtagcttttataattgccccttctatttgcctttatttagatcttcatttcttcatacaacttcaaggtactgtctagtgtcctttcatttcaccttataggactcccttaagcatttcttgcagggcaaatctagtggtaactacctccctcagctttgtttatctgggaatgtcttaatttctccctcatttttgaaggacagttttactggatgtaggatatttggttcacagatatttttcttttagcactttgaatttataagcccactgccttctggtagccaacatttctgacaagaaatctgttgattatcttataaagatcccttgtgtgcaacaagtcacttctcttgctgctttcaggattctttgtctttctttctaaagtttgattataataagtgtgggtgtctttcagttcatcttacttggagtttgttgagcttcttagatgtttatgtcttttatcaaatttggaaaatttcagtcattatttcttctaatattctctcttccctcttttctcattcttttccttctgggactttcacaatatatatgtaggtttgcttgatggtgtcccacaggtctcttacactgttcatttttcttcaatttttaaatttattttcttcagactaaatagattcattgtcctattttcaagtttatagattcttctgcctgcttaaatatgcccttggatctttctagtgaatttttcctttcagttattgtacttttaagctctagattttttttttgcttcttttgaggttttctgtttttgttgatattttaattttgtttatacatagtttttttgactttttttcacatcttcctttagttctttgagcatcttttaaagagaattgttttaaagtttttgaatacatttatcatcagttcctttttagaggcagtttctgctgattttcttttccatttgaatgtaccatacttttctgtttcttttatgccttttgatttttttgttaaaaactggatgtttgaatataataatgtagtaaatgtggaaatgagtctctccacccttcttagactttgccatcttttttttttttttttttttttttttttaagacgaagtcttctcgctctgtcacccaggctggagtgcagtggtgccatctcggctcactgcaaactctgcctcccaggttcatgccattctcctgcctcagtgtctggagtagctgggactacaggtgcccacgaccatgcctggctaattttttgtgtttttaatagagatgaggtttcactgtgttagccaggatggtctcgatctcctgacctcatgatccacccgcctcggcctcccaaagtgctgggattataggcgtgagccaccgcacccagccaactttggcatcttttgtaattgtttttgttttcattgtcataggctacttgtatgccaaagatcagcttgaggtgtaaacttaaggtcttcttaggtcttttctgaggtttgcatatttttctagacatgcacagtcactgtctagctttccttgtatatgcagttgttttttaatgtcttagccattattgtgtacctcctaaaaggagaaaagaaaaaaattgagaaaaaaagggttcttgcttgttaaatcttcaggtactgttcccaatattgtgtaagcattagcactatttctgctaatcttttcagatagttcttttactggcctcagatagtttcttcgtaagcttgtactgatcagtactctactgcatactgaacagtatgcatattgctggggttctctctgtatgtagctctctcctctctggtattccgccctataaactaagtcattttggtttccctagtactcagctacatctcctcaagtcaggcagtctgctgggtactgcttagttttccctccctgtactgcaggctagaaattctctcaaggcagtaagttggggaaattgtaagactcatattgtttgttttcaatctcttggagattactgtccttcaatgtctgatgtccagtgtcttgaaaactgttgtttcatatatttttttctgatttatttttgttgttttaggtgaaagggtaagtctggaatgatatagattggctctgtgtcctctcccaaatctcttgttgaattgtattcccagtgttgggggagggatctagtgggaggtgattgaatcatgggggcagtttcccccttgctgttcttgtgacagtgagtgaatgctcacgagatctagttgtttgaaagtgtgtggcacttctcccttttctttttctcctgttgccacatgaagatatgcttgcttccacctcacattctgccgtaaccatgtttcctgaggcctccccagccataactcctgtacagcctgtggaactgtgagtcaattaaacctcttctctttataaactacccagtctcaggtagttatttatagcaatgtgagaacagactaatacagaaaattgatatcagagaaatggggcattgctataaaggtacctgaaaatatgatagcagctttggaactgagtaatgggcagagactgaaacagtttggagggctcagaagaagacaggaacatgagggaaggtttggaacttcctggagacttgttgaatggttttgaccaaaatgctgatagtgatatggacagagatggccaggctgatgaggtctcagatggagctgaggaacttattgggagctggagtaaaggttactcttgctatgctttagtaaatatactggcagcattgtgctcctgctgtaaagatctgtggaactttgaacttgagagaaataatttaagatatctggtgggagaaatttttaagcaaagcattcaagacgtggcttggcttcttctaacagcctatgtttatatgtgttgttcacaaagaggtggtctgaattggaacttacatttaaaaaggaagaagagcataaaagtatggaaaatttgtggcctgaccaggtggtagaaaagaaaaacccattttctgatgggagaaattcaagccagctgcagaaatttgtgtaagtaaagaggagctgtgttaatatccaagacagtgggaaaaatacctacagggaatttcagagaccttcacaacagcccctcccatcacaggcctggaggcctgggagggaaaaatggttttctggaccaggcccagggccttgctgctctgtgcagccttgggacatggcgccctacatcccagccactccaattccatccatggccaaaaggggccaaggtacagttcaagttattgcttaagagggtaagccccaaaccttggtggcttccacatggtgttgggcctgcaggtgcacagaaggcaagagttgaggtttgggaacctctgcctagatttcagaggctgtatggaaacacctggacatccaggcagaagtctgctgcaggggcagagccctcatggaaaacctctactagggcagtgtggagggaaaatgtggggttggagctaccatcatttgttaaagactacacaaaataaaaagatgttgtaaagcatgatatccaaagcataaaatgtggaagggtggagtaaaagcatagaatgtatgtgattgaagttaagttgttatcagcttaaaatagaatgttctaactacaagatgttttatgtgagccctatggtaaccacagagaacaatcctttagtaaatacacaaaagataaatagaaaagaatgaacacacactattgcaaaaaaaaatcaacaaatcacaatgaaaaacatcaagagaagaaaaaacgtattatcattgcaatcaatgcttaaaaaccattgacaaaatccaaaatttttaatgataaaaactctcaacaaattaggtatagatggaatgtacctcaacacaataaaggccattaatgataagcccacaactaatatactcaatgataaaaagctgaaagtttcttctaaaatgagcaacaagacctgagtacccattcttgctacttctattcagcatagtactagaagtctgagccagagcaattaggcaatgaaaagaaataaaaagcatccacattgaaaaagaagttggccaggcaaggtggctcacacctgtaatcccagcactttgggagaccgaggcaggcagatcacgaggtcaagagattgagatcatcctggccaacatggtaaaaccccatctctactaaaaatacaaaaattagttgggcgtgatggcatgcacctgtagtccctgaacctgtgaggtggaggttgcagtgagccaagatcgtgccactgcactccagactggagacagagtgagactctgtctcaaaaaaaaaaagaagttaaattgtctctgtagatgacatgatttcacatgaaagaaaaactaaagacttcaatgaaaactgttagaactaataaacaatatcttattacaggatacaaagtcaatatacaaaaatcagttgtctttattcactaacagtgagcttccaaaaaagggattaagaaaataatatccttaggaacaaatacaaccaaggaggcaaaagagctatatactaaaaattataagacattaatgaaagaaattgaaggcacaaataaatgtaatgatataccatttcattgattggaggaagtaatgttgttaaaatgtccacatgtcaaagtgatctacagattcgttacaatcattatccagattcccatgtaatttttcacagaaatagaaaaaacaatcctaaaattcatatggaaccacaaaagatttcaaatagccaaagcaatctttagaaacaacaaagctggaggcatcacacctcctaatttcaagctatatttgaaaacaatagtagtctatacctgtgtaacagtatggtactggtatagaaacagacatactgctgctgtaaatgcccgtagggaggcaggcaccctaggatccactagcaccctgctgtagctgatgagtatgtgccccaccacactgctgctactgctggcacatgagaatgagaatggatcccattgccaccaacctatgaaatgctttggctggcaccacccattggattgtagagaccagtagtctgggagcacctcacccccgcaaccactctcacccagtgcagtaagttcctaaccttgaggagccagagaacaaagttggggcccagtacaagtccctcagaattagagcttgcatttcaggagttgggagctgagacttggccccctaaaatctcccagaaacaaagccagtcaactgaactcacattataccacaatcaaaccttcaaggccatcaaataagataaagaaaaaaaatctgaagaacagcaacttcaaaaactgaaggaatatcagcccacaaagatgagaaagaaccagcgcatgaaaactgatgtatcaaaaagccagagtgcctttattcctccaaacgatagcactacctctccacaaagcattctgaatgtggcagagatgactgaaacgacagaaatagaattcagaatatggataagaatgaagacaattgagatgcaggagtacattaaaagccaatccaaggaagctaagtatcacagtaaaatgatacaggagctaacagacaaaaagccagtatagaaaagaatgtaattgacctgatagaactgagaaacacactacaagaatttcataatgcaatcacaagtgttaatagcagaatagaccaggctgaggaaagaatctcagagcttaagaaataagacagctttctgaaataagacagctaagaatagagaaaaaagaatgaaaaggaatgaacaaaacctccaagaaatatgggattatgtaagagagcaaatctatgacacactggtgtccttgatagaggagaatggaagcaacttggaaaacttatctttcatgataacttccccaacctagctagagaggccaacattttaactcaggaaatgcagagaaccttactaagatacttcacaaggaagatatccctaagatacataatcatcagattctccaaggttgaaatgaaagaaaaaaggttaaaggcagctagagaaaaaggtcaggtcacccacaaagggaaggccgttagtctaacaatgaaactctcagcacaaaccctaaaaggcagaagagattggggaccaatattcaacattcttaaggaaagtaaattccaaccaagaatttcatatcaggccaaactaagattcataagtgaaggagaaataatatctttttcagacaagcaatttgttttcaccagagggaatttatcaccagatgtaacttgaaggaggcaagagcttctgaagaaagcactaaatatgggaagtaaagactgttaccagccactatgaaacacactgaagtacacagaccagtgacactataaagcaaccacacaaacaagtctgaataataaccagataacatcatgatgacaggatcaaatccatacatttcaatatgaaccttgaatttaaacagattaactgcctcaattaaaaggcacataatggcaagctggatagagaagcaagacccaacagtatgctgtctccaagagacccatctcacatgcagtgacatacataggctgaaaacaaagggatcgaggaaaatctacgaagcaaatggaaaacagaaaaaagcgtgggttgcaatccaagtttctgacaaaacagataataaaccaacaaagatcaaaaaagacaagggcattacataatggtaaatggttcaattcaacaagaaaatctaactattctaaatatacatgcacccaacagaggagcacccagattcataaggcaagttgttagagaccttcaaagagaattagactttcacacaataatagtcagagacttcaacaccccactgacagtattagacagatcatcaaggcaaaaaattaacaaagatatttaggacctgaaatcagcactggatcaaatggacctgataggcatctacagaacactccaccccaaaacaacaaaacatatattctcctcatcaccacatgtcacatactctaaaattgatcacatagtctaaaataaagcactcctcagcaaatgcaaaagaactgaaatcataaaaaacaatcatttggactacagcaccattaataatagaattcaagacaaataaaatagttcaaaaccatacaattacatggaattgaataacctgttcctgaatgacatttgggtaaataatgaaataaaggcagaaatcaagaagttctttgaaactaatgagaacaaagataaaacatgccagaatctctaggacacggctaaggcagtgttaagagggaatttatagcactgaatgaacacatcaaaaaattagaaagatttcagattaacaacctaacatcacaagtaaaagaactagacaaccaagaggaaacctaccccaaagttagcagaagacaagaaacaaccagaatcaaagctgaactgaaggagattgagtcatgaaaaaccattcaaaagatcaacaaatccaggggttggttttttggaaaaaaaaaatacaatgcatagactgctagctagactaataaagagaaaagagataggagccaaataaacacaattggaagtgacaaaagggatattaacactggccccacagaaaagcaaataaccatgagataatattatgaaaacctctatgtacacaaactagaaattctggaataaatggataaattcctgtacacatgcaccctccacatacaccttcctgaaccaggaagaaattgaatctctgaacagatgaataatgatttcctgaataagtaataagcctaccaaccagaaaaagcccaggaccagaaggattctcaactaaattatgccaaaagtataaagaagatctaataccatttctatttaaactattaaaaaaaattgaaaatgagggactcccctctaacttattctatgaggccggcatcatcctgataccaaaacctggcagaaacacaacaaaaaaagaaaacttcagaccaatatccttgatgaacattgatgcaaaaatcctcaacaaaatatgggcaaactgaattccagcagcatatcaaaaagctaattcaccacaattaagtaggctttatccctgggatgcaaagttgagtcagtatacgcaaatcaatgtgattcatcacataaacagaactaaagacaaaagccatgttattatctcaatagatgcagaagaggtttttgataaaattcaacaccacttcatgttaaaaattatcaataaactagatattgaaggaatatacctcaaaaagagacatccaagacaaacccacagccaacatcataatgaataggcaaaaacagaagcactacccttgaaaaccagcacaagaaagccaagaatgccctctctcaccattcctctttagtatagtattaggaatcttggccagagcaatcaggtgagagaaggaaataaagggcatagaaataggaagacaggatgttaaactattcctgtttgctgactacatgatcatatatctagaaaactccatattcttggcccaaaagctccttaagctaataaacaacttcagcaaactctcaggatacaaaatcaatgtacaaaaataactaacattcctatacaccaattacagttaagccaagaaccaaatcagaaacacaattctattcagaattgccagaaaaagaataaaatacctaggaatacagctaactagggaggtgaaagatctcaacgaagagaactacaagccactgctcaaagaaattagagatgacacaaacaaatggaaacacatcccatgctcatgaatagaaagaatcaacatcgttaacatggccatagtacccaaagcaatttatagattcaatgctattcctgtcaaagtgccaatggtattcttcacagaactagaagctgttttaaaatacgtatgaaaacataaaagatcctgaatagccaaggcagttctaagcaagaagaacaaagggggaagtatcacactaccttacttcaaactatactacaggactatagtgaccaaaacagcattgtactggcacgaatagaccaaaggaacagaatagagagctcagaaataaggccacacacctacaatcatctgatcttggacaaagctgagaaaagcaagcaaaggaaaaaggactccctattcaataaatggtacttggataactggctagccatgtgcagaagattgaaaatgaaccccttccttacaccatgtgtaaaaatcaactcgagatggattgaaggcctaaatataaaacccaaaactatgaaaatcctggagacataggaacaggcaaagatttcatgacaaagatgccaaaagtgattgcaatgaaagcaaaaattgacaaatgggatctaatgaaactaaagactgtctccacggcaaaagaaactatcaatagagtaaacagacaacctacagagtgggagacaatcttcccaaactatgcatctaacaaaggtctaatatccagcatctataacgaactgaaacagatttacaagaaaaaaaaaaaacattaaaaagtggacgaaggacatgcacagacacttttaagaagacgacatacatgtggccaaaaagtgtataaaaaaaaagctcaacatcactgatgattagagaaatgctagtcaaaaccacaatgagatatcatctcacaccagttagaatggcaattattaaaaagtaaaaaaatagcagatgctgatgaggttgtggagaaaaaggaacagtcatacactgttattgcgagtgtaaattagttcaaccattgtggaaagcattatggcaatttcttgaacagctaaaaacagaactaccattcgacccagcaatttcattattgggtatatacacaaaggaatataaattgttctaccataaagacacatgcatgtgtatgttcattgcagcactgttcacaatagcagggacatggagtcaacctaaatgcccatcagtgatagactggacaaagaaaatgtggtacatatacaccatggaatactatgcagccataaaaaaagaatgagatcatgtcttttgcaggaacatggatggagctggaggccattattcttagcaacctaatacaggaacagaaaaccaaatatggcatattctcacttataaatgagagctaaatgataagaacacatggacatatacaggggaacaacacaggggccttttaaagggtggagagtgggaggagggagaggatcaggaaaaataactaatgggtactaggcctaatacctggatgacaaaataatctgtgcaacaaacccccatgatatgggtttacctaataacaaacctctacctgtactcctgaacttaaaagttaaaaaaagacagacatggctgggcatggtggctcacgcctataatcccagcactttgggaggccgaggcaggcagatcacaaggtcaggagattgagaccatcctggctaacacagtgaaaccccgtctctactaaaaatacaaaaaattagccaggcctggtggcaggcacctgtagtcccagctactcaggaggctgaggcaggagaatggcgtgaactcgggagatggaacttgcagtgagccaagattgcaccactgcactccagcctgggtaacagagcgagactccgtctcaaaaaacaaaaaaaaagacagatatatacaccaatgaaacagaacagagtgcccagaagtacaccatatagaaaaattaactcaaaatggattaaagacttaaatgtaagacctgaaatcataataaaactcctgaaacaaaagatagggaaaaagcctcttgatactggtcttagcagtgatttcttggatatgacaccaaaagcacaggcaacaaaagcaaatataaacattctggactacattgaataaaaaggcttcagtgcagcaaagaaaacaacgtgatgaatacacacctatagaatgttagaaaatatttgcaaaccacatatctgataaggagttgatatcatatatcatatatatacacatatatacatatatatacacatatatatacacacatatatatacacacacacatatatatacacatatatatatggaacacaaaactctagcaaaaaaccaaatagctagattaaaaaatgctcaaaggacctgaattgccatttctccaaaaaagacatacaaatggccaacacttatatgaagagctcaacatcactaatcagggaaattcaaatcaaaactacaatgagagatgacctcatacctgttagaattgcttattttaaaagcaacagattaaaaagtataggcaagagtgtagggaaatggaacccttgtacactgctgatatgaatttaaattggtatcattgttatggaaaaaaggatgggggttcctcaaaaaattaaaaatataggttccagtaatttcaactttgtgtatatattcaagggaaatgaaatcggtatctcaaagagatatctgcactcccgtgtttattgcagcaatatttacaatagtcaagatatgagaacaacacaagtgtccattgacagattaatggataaagaaaatgtgacatacatttgccaatcagctattagaaaagaagaaaggtgacatgtatgaacctggatgacagtatgctaagtgaaataagccacacatacaatgacaaatactgtatgatctcacttatatgtggaatataaaaatgtcacacagaagcagagagtagaatggtggttgacaggggctggggctgggggaaatggagagatgctggtcaaagggtaccaacttttagttataaaatgtgtatgttctgggaatctaatgtacagcatggtggctatagttaataacagtgaattgtttacttgaaatataataagagaacatatttgaaatgttcttaccacaaacaaaaaagggaagctgtgtgttgatggatgtgttaatttgattgtggtacttcttacacaatgtatgtgtatatcaaatcacgtacaccttgaatatatgcaatttttatttgtcaattatacctgagaaaagctggaaaaaataaaatggtgattataaataaaatacagtggacacttagtacacctctccttccaaaccaaaatatttgcagtcagttttgtacagccattattaacatgtaaaactgtttgttttagtatccactaccagttatctttcatcatagctctctcattttttagttgttaacttttacttatttcttaggtaggtagagtgtgtctgaagacaaggttttcatgaagaatgcagtgattaatttttggagtttttattatctgagaatatctgtgtagaaacaaaggaaagataaacattttacaaacattttcttcgtagagcttggtagacattaatttattgttatatttcagaggtttctttggttactgatatggtttggctgtgtccccacccaaatctcaacttgaattgtatgtctcagaattcccatatgttgtctgggagggacccattgggaggtaattgaatcatgggggcttgtctttcccatgctatactcgtgatagtgaataagcctcagaagatctgatgggtttatcaggggtttccacatttgcttcttcctcattttctcttgctgctgccatgtaagaagtgcttttcgcctcctgttatgattctgaggcctcccaagccatgtggaactgttagtccaattaaaccaaaaatgtggaagcaactttggaactgggtatcaggcagaagttggaacagttttgaggtctcagaagaagacaggaaaatgtgagaaagtttggaaccttctagagacttgttgagtggctttgacaaaaatgttgattgcaatataaacaataaggtccaggctgaggtggtctcagatggagatgaggaacttgttgggaactagagcaaaggtgactcttgttatgttttagcaaattagcaaggatactggcagcattttgcccctaccctagagatttatggaacgttgaacttgagagagatgatttagggtatctggcagaagaaatttctaagcagcaaagcattcaggaggtgacttgggtgctattaaaagcattctgttttaaaagagaaacggcataaaagtttgaaaattttgcagccttacagtttgatagaaaggaaaatcccattctctgaggagaaattcaagctggctgcagaaatttgcagaagtaatgaggatccaaatgttaatccccaagacaatggggaaaatgtctccagggcatgttggaggtctccaaagcagcccctcccatcacaggcctggaggcctaggaggaaaaagtggttttctgggccaggcccaggatccccatgctgtgtgcagcctagaggcttggtgccctgcatcctcgccactctagctctggctgaaaggggtgaacgcagagcttgggccatggcttcagatgatgcaagcctcaagcttggcagcttccacatggtattgagcctgtgggtgcacagaagtcaagaattgaggtttgggaacctcttcttagatttaaaaagatatatggaaatgcctggatgcccaggcagaattttgctgcaagggcgggtttctcactgctagggcagtgcagaagggaaatgtggggttggagtccccatacaaagtccctgctgaggcactgcctactggagctgtgagaaaagggccactgtcctccagacctcagaacggtagaaccactgacagcttgcaccgtgcacctagaaaagccacagacactcaacaccagcccatgaaagcatccaggagggaggttgtaccctgcaaagccacaggggtggagctgcccaagaccatgagaacccaccttttgcatcagtgtgacctagatgtgagacctggagtcaaaaaaaatatcatgttggaactttaaaatttgactaccctgctggatttcagacttgcatgggccctgtaacccatttgttttggccaatttctcccatttagaatggctgtacttacccaatacctgtacccccattgtatctaggaagtaactagtttcttttgattttagaggctcataggcggaagggacttgccttgtctcagatgagactgtggactgtggacttttggctgaaatgagttaagacttcgggggactgttgggaaggcatgattggctttgaaatgtgaggacatgagatttggaggggccaggggtggaatgatatggtttggctgtgtccccacccaaatctcaaattgtatctcccagaattcccatgtgttgtggaagggacccaggggaggtaattgaatcatgggggccagtctttcctatgctgttcttgtgatagtgaataagcctcacaagatctgatgagtttatcaggggtttctgcatttgttttcttcctcattttctcttgctgtcaccatgtaagaagtgcctttcacctcctgcgatgattctgaggcctccccagccatgtggcactgtaagtccagttaaacctgtttttcttcccagtctcgggtatgtctttatcagcagcatgaaaacagactaatacagttacaatcacaaaaaaactcaaatagtgtaagccaaaaataaaaagtgtaggaggatttattgacttcctgattgattgattgattgattgattgagacacgttgttgctctgtcaccccggctgtaatacagtggtgtgatatagttcactgtaatctcaaactcctgggcttaagcaatctccccacttcagcctcctgagtagctaggactacaagcatgtggcaccacaactggctaatttttaattttttttttgttgttgagacagcagtcttactttgttgcccagactggtctcaaactcctgacctcaagcagtcttactgccttggcctcccaaagtgttggaattacaggtgtgagccaccatgcctggccaaaagaggatttattgactcatataaatgggaaggagagtgatgaatccaaactttagtggatcttgttagaaagtcctcttcaactcatgcctgtaatcccagcactttgggaggctgaggcaggtggatcaccaaaggttaggagttcaagaccagcctggccaatatggcgaaaccttgtctcttctaaaaatacaaaaattagccaggtgcaatggcgcacacgtatagtcccagctacttgggaggctgaggcaggagaatcacttgaacccaggaggcagaggttgcagtgagctgagatcacaccattgcactccagcctgggtgaaagagtgagactctgtctaaaaaaaaaaaaaccaaagtcctcctcagatttgtaggttttgtttgttcttgtttttaaaatcttaacctatctttgattggcttcattttcttgggcttccacccaagaaacagacttccactcatctcttgtggcttactttgtcacagtctagattgaaggggagagctttctttctaggtgtgtatgtttttcagttctggttaagggctccagttagctttgactttttcacatgcctacattttggaccaattgtcattgccagggaaatggtaaactataattggctaatcctgggtcacttgcttacttctgtggtcaggtgacaaagtttataaccaaaaggacgatgagaatcttgctgagcagatatttttcttttgaaaatgtgttaaactcattttctgttatatctccaatcattgcctagtttcatttactttcttttgtaatgcaaatagtctttaaggtttttttgtttgttttgttttctgtttcataaatctttttctttcagacaggatctcactctcttgcccaggctggagtgcagtggcacgataatggctcactgtagccttgacctcccaggctcaattgatcctctcgcctcagcctcccaagtagctgggactacaggcatgtgtcagcacacctggataatttttgtattttttttttattgtagagatggggtttcaccacattgcctaggctgatctcaaactcttgcgatcaagcgatctgctcacctcagcctctcaaagtgctggtattacagggatgagtcactgtgcccagtctcataaatcttaaaatcagtggagattctacccaatttatggcatacagtaaactgtgaccacttttttgtgtgtttctcctagagtaaattattatcttgtttacttcttacattaatgctttaaagatgctgtaacaaagaaccacaaactaggtggcttcttaaaacaacagaaatctattatctcatttcctgaggccagaggtctgaaatcaaggtgttggcagggccatgcttcctccacagccattaggggaggcactttcttctatcttctgttaaactcaggcatttcttgtcttgtggcagcataactccaatatctacttcccatcttcacatgactgtcttccccctttgtctttgtgatcttaacttgattaagtctgcagagaccctatttccaaataaggtcaccttcacaagtactgggggttaggacttcaacatattttttgggaggagaacacaattcaacccataacacttgttttttttatttttctgtttagtccctcctaaactctttgccgattgcctatattgcctctctagatcttcagattcaccaaatttaccacaaatttcaatttactaaggaagtctctcctagagcattcttacctgttctcccatagggtgctattgctctctgtgccccatcctaggatctcctcgtaccatcatcctgggaactcactttgccaatcttctgttttccccatgccatggctttctctttttgccttagtttaggagctaatcttccattggcttcctatgaaagggtacgtgttatagaaattgtttgagacttttcatgactgaaaatgtttttatttcatcttcatatttgattgattatttaagttggctagaattttaggtggaaataattttctttataattttttcagcataactttattgtagttctagcttccagtgttgctttgagaagccatgttgatttctgctcctttataatgatcaactatttctctgtggaagctagagggatcttctccttgtcccttgtattctgatattttatgatgatgtgcttcagtggtttctgcttttatttttattgactttttccttctattttctttcagcttattttatacattgcttagtactggtttagctttatccaacaagtttgataggttataatttcagtattatttgggtttatgtagttttaaattgcattatgactttttgtttgacccaggagttccttagaaatgtggattttagaaattctgagtgcatgaagacttttaacatatatttgtttttcacttccaacttaattacatcaaggtcagagaaagtgttgcatacctggtatggattctttgaaatgtgctttaatatgagtctttttctatataatgtggtagaacatggtggattcttttaatttggaaaaataagcaccttggtttggggaaattttaaaaatcattttattgataatctctacttctttctttttttgagcatctgttatatggagattgggcttcctgtattggccttcttagcttcctatcttcttctaaaaaccttttgtcattttgttctattctctggaagatttcctcaattttatcttccaaatcttatattaggccaggcacagtggctcacgcctgtaatcccagcactttgggaggtcaaaggcaggcaaatcgcttgagctcaggagttcaagaccagcctgggcaacatggtgaaatcccctctctaaaaaaaatacaaaaattagctgggcatgatggtgtgtgcctatagtcccagctactcaggaggctgagatgggaggatgacttgaacccggagaggggcagagattgcagtgagccaagattgtgagatcgtgccactgcattccagcctgggcgacagagccagatgtgtctcaaaacaaatcttatattaaaccttttgtactatgcaataatatttttaatgtataggagctcttttttgttctctgggtacttcactatttcatggttactacatcttctaatcttaattttttttttttttgagacagggtcttgctctgtcacccaggctggagtgcggtggcatgttcacggcctcaaactcctgggctcaagtgatcctcccacctcagccgtcctgagtagctgggaccacagtcatgcaccaccatgcctggcaaattattttggaatttattgatagttgcaatacagcctaatacatggtcaatttttattatatgttgcgtgtgtttgaaagtaatgtttattctgtaattgttgataatgtgttgaaattagccactattacgatggtagatttattactttcttcctatagatctataaatttttgctttatgtattttaaagctcttttatttattccatgcatgtttatgattgttatgcttttctggtgtactgaacctgttttcattctttagcaagcctttctgtttctaataatgttttcttttgtcttgaattctgttttgtctgctatatagttatcccacttttctttacatatttccttggtatatctttttctacccttttattttcaaccttctcatagccttatgtttatggtaggtctcttgtaaatagctttccagtctgacaagctctgtcttttaactttcaaatttagtccatttatatgtactgtgattattgatacatttggacttatttctgtgatcataattattatttcctttcatccagttttttttgtatgcctcccttttcttcttaacaatttttgattcattgaaaaaaacaattttggctggtcatgatgtctcacacttgtaatctcagcactttgggaggctaaaactggaggattgcttgaggccaggagttcagaaccagcctggtcaacatagagagaccctgtctctacaaaaggaaaaataattagccaggcattgtggcacatgcctgtagtcctagctactcagaaggctgagatgggaggatcacttgaccccaggagtttgaggctgcagtaagccatgattgtgtcattctaacctgggcaacacagtgaaactcttaaaaatttaaaaaaaaattaactttttccatttcacttctttcccctactgatttgaaactaatactttctattttgtttcttatcattgtataagtccattctcacactgctataaggatactacctgagaccaggtaatttataaagaaaagaggtttaattgactcactgttctgcatggctggggaggccttaggaaacttacaatcatggtggaaggtgaaggggaagcaggtaccttcttcacaaggtggcaggaaagagagagcgcaggggaagtgccacacacgtatcaaccaaatctcatgagaactcactcactatcacaagaacagcatgggggaaactgcctccaggatccagtcatctctcactaggtccctcttccaacatgggattataatttaggttataattcaagatgagatttgggtgggacacagagccaaactctatcaatcatggctactcttgaaattttacgaggtatatttaagttagtaatgtctaaaaatgaacaataactcaactttgttggcaaaaaatataaggaccttacagtacttttaagttcaatcgtccactcccaacttacatatttttgttttacagtattttggttctgtcttttctttcaccccaaattataataatcagcattattgctattatttagacaatgtttgtttatattacatatatttaaatttaataaccttttattcttgcctcttaggacaaccgtctcagatcatttttcttcattttgaaattcaccatttaggccaggcgcagtgactcatgcctataatgccagcactttgggaggccaaggtgggaggattgcttgaggccaggagtccaagaccagcctgagcaatatagcgagatcccatctctagtaaaaaaaaaaaaaaaaaaaagaaaacaagaaaaattcaccatttagattaggttatttagtgaaggtctttggtggtagattgtgttagtttttaaaaaatgcctttaatttgcctttattcttgaaagatagtttttcttggtacacatttctaagttgacagtcattttctctctgctctttgatggtatcattccactgtcttttgacttacatgtggcagttacagttgtcctaatagtataattgtcattgccttgtatgtatgcaggaaagggttaactcagcaggcttgcacattcccaaggtccttaggactgtcctgtggccaggctcctgggagataacctctgagtccttggagtattctgcttcttaggaatgtctgtatgcctgaggtcttgggccttgccagatagtttatgcaaacaatgtggtttatggtaaatacttgtttttgatgccggaggttttggtccacactgtgtctgtttgacctctgggggctgagtagctgaggtctgtcatgaaggaactacatgcctgtgtgactgaccccaaatagaaaccctgacctcaagcctcactgagcttccgctttgcacatgggagaattaagtgctgaccatgtgactccactggaggacaactgctccttgttttggccctatgtcttttccctttgccaattttaatctgtatccttttgctgtaataaactgtaaccctgagtataacagcttttctgaatcctatgagtcctagcaaatcactgaacctgagagtggtcttggggcctgacacatatatcttttctttctggattttgttaaggtctctttgtttggggtgtgctataattttactggaatgtgtacataagtggatgatgatgattattattttaagacagggtctcactctgtcacccaggctggagtgcagtggtaagatcatggatcaccgtatccttgacctcctgggttaaagtgatcctcccaccttagcctcttgagtggctgggactacagatgcatgccaccatgcccagcttcttcttcttcttcttcttctttttttttcagtaaaatgaagtctccctatattacccagcttggctttgaactcctggactcaagtgatcctctcacctcagcctctcaaagtactgggtttacaggtgtaagccactgcacctggcttgattattaattttgtttgctgttctttgtatattctaatttttcttgggattgggcttcctaaatctgtggattcatgtctttcattaatttgggaaaattttcagctattatttattatattctctctggaatggtagttatatgttaggttgcattctatcctccatatcgttgaacctctgttcaatatttttcatttatttgttatagtctgggcaatttccttactaattctttctttatctatctattctgcttcttaagcctttcgctgaattttttatttcaaaaactttttcatttcaagaaattctggttctttttcaaatcttctttccattcctggttattgttttgtttttttgttttgttttgttttaagacaggatgtctctctctgttacttaggctggagtgtagcagtgggattatatctcacagtaaccttcaactcttgggctcaagtgattctcctctctcagcctcctgagtagctatggctgcaggtgtggaccaccacacctggctaagttttctattttttttttttttagagccaggtctcactatgctgcctaggctggtcttgaactcctggcctcaagtgatcctcccactttggcctcccaaagtgctgggattacaagtgtgagccaccacgcctggcctgcattttattcctgatagtttttggttgcttgttcatccttgagagcctggggcctgagggaactcaccacactggagggaaaggccatgggcaaggtctaatgctgtgctggcttcaggtctgacccagcttagtcccattggtggtggtcacaggggtgcttggatcaccataccctcagttccaggtggctcagcaaagagagatagagattccatttgtttaggagaaagtaagggaaaagaacagaagtctctgcctaggaatccagataatttttccatatcttatccaacactaccaaggtggtactaccaaggtggtactgctacaagtctgcaaagaccagtgttacttggcttggggcccaagtcccttggaatacttaagaagccttcccaagaaggacaggcataaacaaatccagactgtaaagactacaataaatacctaattcttgaatgcccatacattgatgaacatctataagcaccagcatcatccaggagaacatgaccccaccagatctaaataaggcaccagggaccaatcctggagaacagagatatatgtcctttcagacagagaattcaaaatagttgttttgaggaaattcaatgaaattcaagataacatagagaaggaatttagaattctatcagataaattagacaaaggcattcaaatacttcaaaagaatcaagcagaaatcctggagttgaaaactgcaatttggcatacttaagaatgcatcagagtctcttaacagcagaactgatcaagcagaagaaagaattagtgagcttaagactggctatttgaaaagacagagaggagacaaaagaagaaagaataaagaatgaagcacacctatgaaatctagaaaatatcttcaaaagggcaaacccaagagttattggtcttaaagaggaggtagagaaagagatagggtagaaagtttatttaaagggataataacagagaacttcccaatcatagagaaaaatatgaatatccaaggacaagaagtttgtagagcaccaagcagatttaatccgaagactacctcaaggcatttaataatcaaactctgaaaggtcaaggatagagaaaagatcctaaaagcagcaagaaaaaaagaaacaacgtaaaatggggctgtaatacgtctgtcagcagactttacagtagaaaccttacaggccaggagagagtggcatgacatatttaaagtgctgaaggaaaacaacttttaccctagaatagtatatctggcaaaaaaaaaaaaaaaaaaaatcctttaagcatgaaggagaaatagagatctccatacacaaataaaagctgagggatttcatcaacacccggcttgtcctataggaaatgctaaagggatttcttcattctgaaagaaaaggatgttaataaacaataagaaatcacctaaaggtagaaaactcactggtaactgtaagcacagagaaaaacagaatagtataacattgttatcacagtgtgtaaacttctcttgagttaagtagaaacactaaacagtgaaccagtaaatcataactacaacttttcaagacatagacagtacaataagacataaagagaaaaaacaaaaagttaaaaagcaagaggacaaagttatagagttttaatattatttttgaatgtttatgaaagcagtgttaagttgtcatcagtttaaaataattagttataatatttgcaagcctcatggtaacctcaaatcaaaaaatatacaacagatacacaaaaaataaaaagcaagaaattgaagtgtactgcaagagcaaatcatcttcactaaaaggaaaacagaaaggaaggaaagaagaaagagaagaccgtcagtcaaccagaaaaaaaaataataaaatggcagcagtaagtccctaactgtcaataacaacattgaatgtaaatggactaaactctccaatgaaaaaacatagagtggctgaatggattaaaaaaaagaaaacaagacccaatgatctgttgcctacaggaagcacacttcagctataaagatacacacaaaatgaaaataaagggctggaaaaagatattttatcccaatagaaaccaaaaagaagcagtagctgtacttagacaaaacagatttaaaggcaagaactaagaaaagacaaagcaggttattacataaagataaaggggtcagttcagtaagagcatataatgattgtgaatacatgtgcacctaacactggagcacccagatatataaagcaaatattagtagagctaaagagagaggctgggtgtggtggctcatgtctgtaatcctagcactttgggaggccaaagtgggaggatcacttgagcccaggagtttgagaccagcctgggtaacaaagtgagaccccatgtctccaaaaaaaaagccaggcatagtggcaccagctatacataaggctgaagtggaaggattgcttgatcccaggaggttaaggctgcggtgagctgtgtttggaccactgcattccaccctgggcaaaagcaaaagagtaaatcttgtctcgcaaaaaaaaaaaaaaaaaaaaaaaaaaggcagacctcaatataacaatagctagagacttaaagagcccattttcagcattggacagatctcccagacagaaaatcaacaaagaaacatcagacttaatctgcactgtagaacaaatggacctaatagatatttatagaacattttatccagtggcttcagaatacacatttttctcctcaacgcatgaatcattctcaaaggacaggccatgtgttgggtcacaaaatgagtcttaaaacactcaaaacattgaaacaatgtcaagcatctaccctgaccacaatggagtaaaacttaaaatcaataatgaggaattttggaaactatacaaacacctggaatttaaacagtgtgctcctaaatgaccagtggccaatgaaaaattaagaaggaaattgaaaatattattgaaacaaataataatggagacataacattccaagacctatgggatacagcaaaagcagtactaatggaaatttagatctgtaagtgcctacatcagaaaagaggaaaaacttcaaataagcaatctaatgacgcatcttaaagaattagaaaaagcaggagcaaagcaaacccaaaattagtagaagaaaagaaataataaagatcagcacagaaataagtgaatttgaagaaacatacaaaagatcaacaaaacaaaaagttggtattttgaaaagataaacaaagttgacaaatcattagccagactaagaaaaaaagaagacccaagtaaataaaatcagagatgaagaaggaacattacaatgaatactacagaaattcaaaggatcattagtgtccactatgagcaactatatgccaataatttggaaaatttagaagaaattgataaatttctagacacatagaacctacaaagattgaaccatcaatcaaaaacctgtatagaccaatacaagtaatgtgaccgaagccataatagtctcccagtaaagaaaagcgcaggacctcatggctttgctactgaattctaccaaacatttgaagaagaactaataccaatcctactcaaactgttctgaaaaatggaggagggaatacttccaaattcattctgtgaggccagaattaccctgataccaaaaccagagaaagacacatcaaaaaaacaaaattataaaccagtatctctgatgaatattgatggaaaaatcctgaatgaaatagtagcaaaccaaattcaacaatacatttgaaagatcatttatcagccaggcacggtggttcacatctgtaatcccagcactttgggaggctgaggcaggcagatcacctgaggtgatcatctgaggtcaggagttcgagaccagtctggccaacatgctgaaaccctgtctctactaaaaatacaaaaaaattaaccaggcgtggtggcacacacctgtaatcccatctactcaggaggctgaggcaggagaatcacttggacctgggaggcagaggttgcagtgagctgagaacacacgactgtactccagcctgggcaacagagtgagactccatctcaaaaaaaaaaaaaaaggccgggcgcggtggctcacgcctgtaatcccagcactttgggaggccgaggcgggcggatcacgaggtcaggagatcgagaccatcccggctaaaacggtgaaaccccgtctctactaaaaatacaaaaaattagccgggcgtagtggcgggcgcctgtagtcccagctacttgggaggctgaggcaggagaatggcgtgaacccgggaggcggagcttgcagtgagccgagatcccgccactgcactccagcctgggcgacagagcgagactccgtctcaaaaaaaaaaaaaaaaaaaaaaaaaaaatagctggatgtagtggtgcatgcctatagtttcagctacttgagagtctgaggtatgaaaatcacttgaacgtgggaggcagaggttgctttgagccgagatcacaccactgcactccagcccgggcaacagaatgagaccctgtctcaagaaaaaaaaaaaaaaaaggaagtttctatatagactttatttaaaataacagaagccctggataaatacatctctgcttcttaattctaaaaaacaagatatgtcacttctgaaagacatggcattgctttccgtcctttcccccctccccctccctccccctgtccctcctcctctccctccccctctccctccccctctgcctcttcctccacctctgcctctgcctcaaggaatcctcctgcattggcctcccagggtattggaattacaggcgtgagccaccgtgcccagccggtatttttttattctggagactatctgcctgatgggaaattgtcaacattacctgaggtaaaaaatcaaggaatttagtgtttaactcagttaaatttaaatttggattttaactcaataaatcatgcaaactttctctcccacttcagcatgcttgaatctcagctctaccattacttactccctatccttaagtaagtcaatctctctgaaactgttttctcatttataaaatggagataatataatctgccttgcttggttcttgtgaatattaaatgaacatatgttttaaaaccaattactgttaggagtggagtaagcatttaataaatgcttgctgttattaatatctaagaaatacagatattaagactagttgcatttgaaataaagcaacatacaaatgtagtatttggaggaattatgcaatatctgctttttttcttttccagtttcctgcaaatgcatcagaaatatgttgtattattagaacatcaccaggaactagacaagtgaaaaataaaggtgttattgtaaagaagaagaaatattctcttcctaaggatacccctcaaggtactgtagtatgaatgcagagcatactttttggatgatataaaacatttttttcattaaaaatgccttatgtacacaggaaattcaattataaattgtattctaagagttcttgcagaaagtggaaatggtaaaattataaaagcctggtcaggggtggactcagtggctcatgcctataatcccagcactttggatagctcaggcaggaggatcagtagagcctaggagttcaaggttatggtgagctatcatcaggtcactgcactccagcctgagtgacagagagagaccctgtctcttcattaaaaaaaataaagtctggtcagatttcagaacaagaaccagagtaaaataattttttgaaagacagatactttatcttttgaaaaattagcgtatggcactaatgtaaaatatatttatccaggatactttctcttataattatgtgaaatttagtattgttttggtttcaattttagtagcattatttttagagatgtggagatgtttttgcattcacctcatattggttgagtacttcctctgtgaaaggcactgtgctaagaaccttatatttcattacgactttataatagatgtgtactgttattcccattttacatattaagactctgagatttaaagtagtaaggaatttgtccaagatcatacttcttcaagtggtagagaggaattcaatcttttaagctttctaactccaaatgcagtgtttttttgttttgttttgttttttctttggttttttgagtttagaaggcttaacatctcccctcactatgcttcagccagaatgtctaattactcagtggcactttggaatttttatgagtaaatagccaatgaagcaattgaaatttagttagatatgtacagcttcaattcaaccaagatgtccactcttaattcttgtacttatttcctccacagtacctgccctgagcattctctaagtctatagagatcccttttttataagttccttgaatactcaattcagtgctactcatttgatacttaataattgtatttgtcagggttctccagaaaaacagaacctaaaggagatagagatatatgagaggggattttttttttttttgacagattctcgctctgtcacccaggctggagtgcagtggcgcaatctcagttcactgcaagctccgtctcccaggttcacaccatattccagcctcagcctcccgagtagctgggactacaggcacccgccaccacgcccggctaatttttttttttgtattttcagtagagatggggtttcatcgtgttagccaggatggtctcgatctcgtgaccttgtgatctgcctgccttggcctctcaaagtgttgggattacaggcgtgagccaccgtgcccggccagtgagggggatttttaatgaaaattggctaatgtggttatggaggctgaaaagttccatgatatgccatctgccagctggagaaccagagaagccagtggcatcactaagtccaagtccaagggacttagaacttggggagtgtttatgcaactcccagaatccataggctaaggaacctggagttctaaggtccaaggacaagagaaaatggatgtcctcgctccagaagagagagtaaatctgcctttcctccgccttttctattctggtcctcaaccagttggatggtgcctgaccactttgggtgagggcagattttctttattcagtccactgattcaaatgccagtctcttctggaaacatcctcacagaaacagatctactcagaaataatgctttaccagctttctgagtatcccttattccagccaaattgatatctaaaattgaccatcacaataatatattgctacccaacctaatttacagtgctgacttttcatatttcatattccttaggttatgaagttttcaaggagaaagcacataattgacttctttctatctctatctctgataacatcagcatagtggtagggaatagcaagatcctgtatttgtcaggatcctacaaaagaaaaagccaattttatatatatggaaaacattaaagagaggttgaaagttatagaggatagaataaggcctaacgtatgcaaattaccattccggagagaataaaacaaggaattgacttatacagttatggagctgtagaagtatagctgggcaagtttgcaaactgtatggcaggctggaaactcttgggcaggagccaatgatgcagtctacagatagatttctttttgttcagataaacttcagttttgctcttaaggcctttcaactgattgaatgaggcctacctatattatcagggataatctccttgaagtttatataaagtttattgtagatattaaccacatctacaaaataccttcacagcaacgcttagattagtattgaactgaataattgtgtaatatatcctaggcaagttgtcacacacaactaaccatcacagcgcattccttatcaactatgcatccatttgcatctccttaaaccataatttaatctccagataaagacaataataaagtcatacttttgcctaacatgctacaactctcctgcataaaactgaaaatgtgctaaccctttccccagaagaggatacaaagtttcgggcaatgttcacccttcttcttgctatcctgtaacttaaaaactgtgatataaagttaactattattaatacattgtacatcatatgataaagggataagagagagaagaaaacaaagatacttgcctaactaatcaggtgatcgtaacaggtatttataaccaccttcttctattacccatgccatattccttctgccttcagcaggcacttcagatggtcatggttctttacctggtgggtgacacaaactttatttctgatgggtctgggccattagcagtcctgcatggattgggttgttgtagttttccattaacgttaatcacagggtatgataaaattaacagataccctaagagatctcctgtgttccagacatattcttccttaccaccattgtggagtagtagttcagattctccttggtagtccggatcagtcgccccagtcaacaccgtaagtcgcttcttagcctattgactccaaagtgactgggggcagtcttaacttccagtttaatagaattagtctcctgtggaggaatttctccctttggaactaagacctctaagccagtggggcataaaattatgagaacaggaagaataaattttgctagtgggtcaccagggttaataatgcatggtgccacttttgtttctaccccttgattcctggctatggagggaaaaaaagtaccatttattggatgctgattcagagcatatatatagccctctggagaactctgccctccctgcaagttattgccacctagctggtgctataactgaatcttcaaaaggccatcccatcatcctattaggccagcttctttagcatgataaggaacatagaccagtgaattccaggagcaatgactcatactgaaattcttttgctgtgacgtgagttccttgatcagaagcaatgttgtatggaatatgacaatgggtaaagcattccatgagaccatggatgacaattttggcagaattttgtatgaggaaggcaaatctgtatcgagggtctgttctagtaagaacaaaatgctaccccttccatgatggaagtagttcaatgtaatcaactacaaagctgactgagcacccagaggaatagtgccatacttggagtcagtgttgttgtctgctgctgactggttgggccctcagcagtggcatccaggttggccttggatagtggaaatccatattgctgagcctatgtatgacctccattcttgccactgtggccactttgttcatgagccatgaacaaagaggataccagttagcctctttccccagccctgttctgacagaggtggctggaatagagactgactggtttccacagacttgattatcctatattcacttcattattaaaatcctcctctgctaagatcacctttggtgagaattttatggcatacatccttcttttcttttcttcttttcttttttttcccattgagagaggtctgtcctgggtgggtgtgatggctcatgcctgtaatcccaccgctttgggaggttgaggcgagtggatcgcttgagcccaagagtttgagaccagcctgggcaacattgtgaaaccatctcttcaaaaaaatacagaaattagccaggtgtggtggtgcactcctgtagttccagctacttgggaggctgaggtgggaggatcacctgagcccgaggaggtggaagctgcagtaagctgtaatcacgccactgcactgcagcctgagcaatagagtgagatcctgtctcaaaaaaaaaaaaaaaagatctgtccaatgcctcctttcaaatttttcagtccacttgtgatggattactgagtgtcaacttgattgaattaaaggatgcaaagtattgttcctgtgtgtgtctgtgagggtattgccaaaggagattaacatttgagtcagtggactgggagaggcagactcaccctcaatttggtgggcatcatctatctaatcagctaccagcatgccagaataaaagcaagcagaagaatgtgaaaagattagactggtttagcctcccaacctacatctttctctgatgctggatgcttcctgccctctaacatcgaactccaagtttttcagctttgggactcggactggcttccttgctcctgagcttgcagatggcctattgtgggactctgcgatcatgtgagttaatactccttaataaactcccttttatgtatatatattgtattagttctgtccttcagagaaccctgactaatacaatgttctttccaagtccctgaccatacagccaaatcattggctaccactctagaatacagttaaagatcggctgggcacggtggctcaagcctgtaatcccagtacttcgggaggctgaggcgggcggatcatgagatcaggagatcgagaccgtcctggctaacacagtgaaaccccgtctctactaaaaatacaaaaaaattagccgggcatggtggcgggtgcctgtagtcccagctactcaggaggctgaggcaggagaatggcgtgaacccgggaggcggagctttcagtgagccaagatcatgccactgcactccagcctgggtgacaaagcaagactctgtctcaaaaaaaaaaaaaaagaatatagttaaatatctggttatttctcctttcaacaaagcacacaaccgggtgcactcctctcagttctgcccactgggaggacttatcttcaccaatttcctttagggatgtcccagaaagaaattgtaggtgctctaactgtcgactttaaggcagtacctgcatatcatagagaaccatttgtaaatcaaatatgagttttctcttcctcagtcaactgattgtagagaactcctcatgtcatcttcagagcaggcagtgagaaaaaaggtaatgtagccagggtgggggccatggacatttgggtcacttcctcatgttacttacttatgacttcagggcctgctcaagctcaattttacataaaccacttccatttgataatggagtgctgccattaacaccaaatttatgacttggtaggtcagacagcacatagttcatgataggcagtgtgggtcacatggtaacttgatggcctatgattaagtgcttagttgctactaaaatttggcaataagccaaaagctgtttctcaaaagagtagttttccactgaggatggaaggacttcactccaaaatcctaaaggttcaccctgggagtcacctgcagggacctgccaaaggctccaagcagcgtttctatctgccactaacactacaagcaccgttggatctgctggatcatttggcacaattttcagagcagctccacagcaacctcgacctattgcagatgattctcttgttctgggcctcccttcaaatctagcagctttttaggtcactcagtgagtgggctggagtggcacacctaaatgagaaatatgttaactccaacatccaaaaaagctgactaggcattgtgtctgccttttggttataggaggtgccagatgcaatacctaattcttcgccttaatagggatgtccctcatactacttgacccctggaaattacaaaggtggaaggcctttggagacctaccaatttcattgtaggaatatacccaactgtaatgtatatatgtgtcaccaaaaaatatctactagaatattaatagcatcagtgttcatgatagcctcaagctggaaactatccaaatgcccattaagtaaaatggatcaactatggtatattcattcattcaagtgctatatagcagtgaaaatcaacaatataaagttatatgcaactgttacatattacatgttatatacaaaattacaaacataatgatgcgtttaacaaagggtgccagacccagtagagtatatttaatattatctacatacagtataaaacttggcaaaactaaactataatggaaatcacgatagtggatgcccttgttggagtgggggcattacttggaagggattacaagggggaattctagggtgccgataatgttgtgtttccttatgtcagtgctgtttacacaggtatgttgtgtttgtgaaaacctatcaagctgtacatatgtgtacatttctgtgtatttgttatactttaagaagaagttggccgggctgggcgcagtggcttaggcctgtaatccgagcactttgggaggcccaggcgggtcaggagatcgagaccatcctggctaacacggtgaaaccccatctctactaaaactacaaaaaattagctgggcgtggtgatgggcacctgtaggcccagctattcaggaggctgaggcaggaggatggcatgaacccgggaggcagagctggcagtgagccgagatcgtgccactgcactccagcctgggcgagagtgagactgcatctcaaaaaaaaaaagaagaagttggctaggcatgatggctcatgcctgtaatcccagcacgttgggaggccgaggtgggcggattacctgaggtcaggagttcgagaacagcctagccaacatggcgaaaccctgtctctactaaaaatacaaaaattagctgggcatggttgcaggtgccaggaggcagaggttgcagtgagccgagattgcaccactgcataccagcctggatgacagagtgagactccgtctcaaaaataaaaaattaaaaaaaaaaaaaagaaaagaaaaagtttacaaataacactagcaacactcttaatttgatctttttggcctgtcatattagtttctgacgttagatattgttaaaattctggacttaagtatgcaacaaatcaaaaccaaagtgtgtctgggaggttcttttgagtgttcagactgaagttttttagtttaatttacagagataactgcccttaattcccctccccattaatgttgaactaatgaactaacggtgccatctcctggcctctttctaggctctcaccgtaacagctgcctcctgtttccctttcaacctctggccacttctctctttcctttagtaaaaatagcaaagcaccaagctaactagtgatcatgttattttaaacatgcagcagcctatttttagtcctggcatttaaagttttagctattttggcagtaatctaatcaggactacagggtgaaattcacttttgaatttcagtctaggactgtgatcagtatgatttttgttcattaataactggcactatgctgattaaataaaaaacaatggtgaaagtgaaccaaagagatgtgatagaggaggtggtgtgggtaagtcgttggaatagtgacagccagataaaggaggctgtagaaaacatctagtctaagctttctcaatgcatggtccttctgactacctcaccagaataactacagacctggtaaacttcagtctctagagatggcacaggaacctgcattttgaaagtgattccagtaagcacaaacatttgagaaccatttcattagtctattttactcatcttacatataacaaaaatgacctggccaggttaagtgacttgcccaaatgcacagagcttattacttgtagaatcagaactagaacaagacactgtaggaacccaagagaggacacttttaactttgaggtgttagagaagtctaataataccttttggctaatcagacaaaacctgcagctatccttatagtaaattttaagatttttttttattctattttgagctccagaagagacgataaattatgtgttatgaattcatatctcagtctagtactgtagaatcacggcctttaactggatgcatatgttatctttagtgagaaatttgattttctagataataatagcaggcagaagtatcacacagatatatgacaaatgaagtggaaacatatttattcgagtatccgaaagatggtagtacaaatcacttaagaataggacatccctaagttcaaatcctaactgttacataagcacattccttaaactttctgaattttagcctcctatctgtaaaattggtaaaatagtagttcttacctcaaagaattgttgtgaggactagagataatctttgtaaagagtgtgacatataataatcactcattatgcaataattatttgtttctataggttaggttaatttctcaagtttagctttcttcatctcccttttgaaaactgttctttggttttgtttgtttttttttttttgttcgtttgtttgcttgttttttgagacagagtctcactctgttgccaggctggagtgcagtggcagctcactgcaacctccgactccctggttcaggcgattctcctgcctcagcctcccgagtagctgggattacaggcacgtaccaccacgcccagctaatttttgtatttttagtagagacagggtttcatctgttgtccaggaatgtcttgatctcctgacctcgtgatccacctgcctcagcctcccaaagtgctgggattacaggcgtgagccaccgcacccagcctgttctttggtttttatcaaattgcaaaaagcctaaaatatgctgactggttagcgtcattgatggtaaattgggttatgccacctcatgtaaagaatatgtcaggtaagtgtgtatagtctttgacacagaaccattgttctagtgaaaataaagagatgaagtatgccagccagtgccttggggataaagaaatccaactagtttgccatcgtggaggccttttaagtctgttgttttagtgtcatatggttatagaatgaaaagatgaagttctccagttatttggttcactcattcagcaaacatttattgagtctggatatcatatgctagaaatagttgctggtgatattgagataaagacatagttgtctttataaagtttatagtctcatagaggaagtcagatatgtaaaacaagcccaatagaggtatatatgtgtttttgtttttgtttgtttgagacagagtgttgctctgtcgcccatgctggagtgcagtggtgtgatcacagctcactgtagcctcgaccttccaggctccagcgattctgccacgtagctaggactacaggcaggtgctaccatgcctacctaatctttatgtattttgtagagactgggtttcaccatgatgcccaggctgatctcgtactcctgggctcaagcaatctgctcaccttggcctcccagagtgctgggattacaagcatgagacaccacacttggcccaaatttactttttacttgctcattctcacaggaagtataggggtgatttgagaaaaagaaatgaccctagaaacaaaaaggccaagtgggagttttgcaaaagttccagtgagcaaagttgaaaaaataagtatctgagctagtgtatctcaaaatgtggtgctcaggccaccagaggaacttataaataatgcagattcccaagtaatcgcctcagggatctgatttaggatttttgtaggatttaggagaaccagtttaaactagaaattttttattggtataattgacagggcttagtgactaacataggtactggtgcagcgtagtaagaaagaatggtagttagagatgacttttgggtctctagtattgtaaagcatcagaaatgatgcactgtaggtgatggtgagggagaatataggtcatggccttggatgtgtatttgaagactgagaatttgaagggtaggtgagataagatagttgggtgggctgattacccatttgggaagttacccagaagttcatgtggagaggatgactgtgaaccattttgcaaagtctttaatgagcgagcagtgtctgaggtcagtaaacagggaggagtagagagtagtaggtatagccagcacttcccagactttaatgtacttgtgaattgcttgaggatcttgttaaaatggagactttgatttagtacttttagaatgggactgctgattctacatttctcacaaccttttaggtgatgctgacataactggtccatggaccccactttgaatagcaaagatacaggtgtctggttctcagcttagctgcacatcataccttcctggttgtctgatatgtgggtcccttatctaattggtatggaagatggcctagatatcaggattttaaaatcctaggtagttttagatgcaacaaaatttcagagccattgatatcggctgatttggccagaggatgaggtatatgatagtatgaaagtggcagtgttaactaggtaaagctggttccactctggatctcttggcacaagatgtgggggcaaaggccccagaatcaatcctgtcttcgggatggaacctgggttcaactgtaataaaggttaggaaaatgcaaaggaaggatgggcaagagaatatgagaggcgacttcctgggtggtggctgaggacagggtcatgaaaagcacaactggatcaagtgctccaggttacaaggctggggttaaaggctctgtgatggccactgacagcaatttttgctgggctttccaccagaatgttattgagcagatctccttgcttctccaaagagaacatgtcctcagcatgtcctagaagggatgagccaaatattcctttttttttttaaatggcctctggatttgtttcctaaggcttgatgggctgaaactagagtgacctgggcattaagtgctctctcccctgcagactggttattagtaagtattggacacctgcttgtatacaaagtaatctattgttatttttttttctccagatatcataataaaaatggcatgaaaaaacagctgtggctgaattttcaccactttgaagacaggagtgtgaagtcaaagtctataaagcagaatgtctgcctgaaattatatgaaattaaaaattaaaaattctccagttatttgtgatatatctctatgttgaaattctactgaggttcttgtcatttacttttaatcagttaagaaaaaaaattattccatatgcttcttaaatatatgtatttatattaaaagataaagaaccaaa

SEQ ID NO: 265 - DNA, 19692 bp, Homo sapiens
gactttcagggcctgctgaggaatctgcaggcctggcagaggacaggagggaggcttggggagcctgggaagggccggctgacagcttgatgggccctccctccctccacagtcccacccccagcctggggcctctgggagccttggtcctgagcagccaacacaccagcccagacagctgcaagtcaccatggacgctgaaggtaaagggacactctctctgccatgtccctgcacccatccccccactgcctacccctgcccccaccctggcttgtctcagccccttgttgcctcctctggagtcatctctcctctggtcccgccatcgactcccttacctaccccatgtccctgcagccttgctcaacccccagaggccccttctcactcttctttctcctgtgttgagtccccaaggagctctggggaaggaaggggcttaagccctagaaaagggcagggtggcctggaggaggtggcgtctcctgggggcagtgggggccggaagtgggaggctggttgggggagcagcatggacttctgctctcgctggtagctcgggagaagcagagacaaagtcctgtcccttctgcagctgggtgggggagggggcttgagtcccgtgattccctgcctggagggagctgtatgcaaactgttggggtgatcagtcccaacccccaaccatgaagtccggtggcaacaaaggaatgagaaaagacaagttaagatttaaagcagccccagggggccagttgctaaagtgaaggctgcagagccctggttgcctgataatttattgagtacaatcttttgatctaagaagcagatggtacggggtgaaacggtgaaggtgggggtgtgcgcgtcatttgaaagatgtatagccgtggtggtttatgtgaatttcctttaagctcaaagcatatgtctaactactaagataatcttttttttttttttttttgagacggagtctcgctttcccccaggctggagtgcagtggcgtgatctcggctcactgcaagctccgcctcccgggttcatgccattctcctgcctcagcctcccgagtagctgggactacaggcgcccgccgccacgcctggctaattttttgtatttttagtagagacggggtttcaccatgttagccaggatggtctcatttcccaacctcgtgatccgcccgtctctgcctcccaaagtgctgggattacaggtgttagccaccgtgcccggccaactaagataatctttaacttattgggctgcagctggtgggagtgggttttacaaggagccaggatgtctggtcacattccaacgcttcaaggaagtgtttcagcccagagcattctgtgtaaagccgcagagcaggtcatgttcactggcctggggacacaatggcaataaggaggtgattctcctcagaggccccctatggtgttccataggtgtcctacacaggggtggctgactaaactggcgccccgtaaacccttccaccagcacaaacccaggggtccatgctctacgctcagaaggctccaccagggatggggctgtgtgaccatgggtgggtcctggcttctcagagtcccgttttcttccatctgtaaaatgacaataatagttccctgctctggcccgccacggtggctcacgcctgtaatcccagcactttgggaggctgaggtgggtggagcacttgaggtcaggtgtttgagaccagcctggccaacatggtgaaaccccgtctctactaaaagtacaaaaattagccgagtgtggtggtgcgcacctgtaatcccagctacatgggaggctgaggcaggagaattgcttgaaccccagtggcggaggttgcagtgagctgagaccaggcctcagcactccagcctgggcgacagagcgagactccatctcaaaaaaaaaggaaaataaatagttccctgctcagaaggttgtggggaggacagaggatgggaggcacaggtgcttagaccctcctccatgtttgaggtgcctgctggccccatacacccggtccctctggctccactgtggaaccagctctcaggggtcccatgcaggatgccacgccaaacacctttcaatctccattgtgtctttctcttttgaaacaacgccgacctggatgtgaatcctgactgccactcagcagcagtggaaaccctggcaagttttgtaacctgtagaagcccgtttccacatctggacaatggagttggtggcactggtctcacggggttgtaatgaagattaaataccttagcagatgtcaaggggtctcgacctgattccttcagagccaggattctttactgagggatcagggatgggctctgggggagttcatgaaccccagaatttgcaggtgaaattgtgtgtctttgtgagaacacggttacgcatttttctgggaaggagatccataattttcatcagatccagattctttttttttttttttttttttgagacagagtctcgccctgttgtccaggctggagtgcagtggcatgatcttggctcgctgcaacctctgcctcccgggttcaagcgattctcctgcctcagcctcacgagtagctgggactacaggcataaaccaccatgcccggctaatttttgtatttttagtagagatggggtgtcaccatgttggccaggctagcagatccagattctttttttttttttttcgagatggagtctgactctgtcaccaggctggagtgcagtggcaggatctcggctcactgcaaccttcacctcccaggttcaagtgattatcttgcctcagcctcacgagtagctgggactacacgtgcttcaggcacttgctgccatgtccagctaattttgtagttttagtagagacagggtttcaccatgttggccaggatggtctcgatctcttgaccttgtgatctgcctcctcggcctcccaaagtgctgggattacaggtgtgagccaccgcacccggcctcttttgttttttagacggggtcttgttctgtcacccaggctggttggtgtgcagtaacataatcatagctcactgtttgtagcctccaacttctgggctcaagtggtcctcctgcctcagcctgtggagtagctgggactgcaggcgtgtgccaccacacctggctaattaaaataaattttttttttttttagagatgggttcttgctgtgttgcccaggctggtctcaaactcccagcctcaagcgatcctccaacctcagcctcccaaaagtgttgggattacaggcatgagccaccgtgcctggctcaaatcttttcatatgtgaacatctcagcatgttttctttctttcttttttgagatggagtttcgctcttgttgcccagactggagtataatggcgtgatcttggctcactgcaacctctgcctcccaggttcaagtgattctcctgcctcactctcccaagtagctggggatacaggtgcccaccaccatgcccagctaatttttttgcatttttttttttagtagagatgggttttgccgtgctggccaggctggtcttgaactcctcacctcaggtgatccacccaccttggcctcccaaagtgctgggattacaggcgcaagtcactgcgcccagcctcatcatgtttttttcttaaaagataaagacttttctttttactacaaccacaatactattgtcaaaactaaactttaaaaatttccttggtgttatcaaacattcaatgtccagattccagtggtttcataaatagcctaatttgcttttagtttgtttgaattaggatctaagtaaaatctacactttgtgattggttagtatgttttaagagtctttgaaactttatttttttgattaaaaaatgtttaatttagagataggggtctcactatattgcacaggctggtctcaaatgccccaaagtgctgggattacaggtatgagccaccacacctgactgattctttttttttttttttgagatggaatctcactctgttgcccaggctggagtgcagtggcgcaacctcggctcactgcaacctccgcctcccagattcaagcgattctctcaccccagtctcccgagtagctgggattacaggcgtgcaccaccacacatggataaattttgtatttttttagtagagacagcgcttcaccatgttgtccaggctggtctcgaactcctgacctaaggtgatcttaggcccaccttggcctcccaaagtgctgggattacaggtgtgaccaccacgcccagccaatatgtggtcttatgagagcattggttcttttttttttttccctgaggcagggtctcaccctgttgcctaggccagagtgcagtagctccatcatagctcactgcagcctccaactcctggactcaagggatcctcccacttcagccttctgaatagctaggactacaggcgtgtgtcaccatgcccagctaatttttaaaattgtttttgtagagatgggttctcactatgctgcccaggctggtctcaaactcctggcctcaagcgatccttctgcctcggcctcccaaagtgttgggattacaggcatgagccaccgcccctggccgagcattgattcttgatcctcatgtgcatctgagtcacagagcagggtgggggctggctcttccccaacctggatccctggaaactacccccagagattctggttcactgggttggaatgggcctgagcatctgaaagtttgaaaagctccctgtgattctggtgtgcagcccaggcagaggccccactgtgtccacttctcttgaaaggagtggttcacaccaacacccccacttccctacctcccgtgcgctcctcgagcatgacaatgtggcttctgcccccgacacatggcacaaaaaccgctctggcacaggcctcacagttgctaagtgcagagccccatcctcagtcttccttctatttacttctgctcacctcccaaaaccctcttctccttcccaggtacccactcctgatgatgcttctctttttgttggacatgccctgtgggttctttatcttattattttattttagagaccgtggcttgctctgtcacccaggctggagtgcagtggtgcaatcacaggtcactgcagcctccaactcctggactcaagccgcagcctcccgagtagctggcgagtagctgggactacaggcgtgcacccccatgcccagctaactttttctttttttcttttgttttttgagacggagttttgctcttgttgcccaggctggagagcaatggcactatctcggcttactgcaacctctgcctcccaggttcaagcgattctcctgcctcagcctcctgagtagctgggatcacaggcgcccaccaccacgcctggctaatttttgtatttttagtagagacggggttttgctatgttggccccggagttcaatttttgtatttttagtagagacggggtttcaccgttttcaccaggatggtcttgatctcctgacctcgtgatcctcccgcctcggcctcccaaagcgctgggattacaggcgtgagccaccgcgcctggccacggcagcatctcttctgaactccagagccattccctaccaccctctgggcaccaccatccacatctcctgctgccgcctcagccttaacctctgcaaaaccaaatccgttctttctctcgagctctgcagaagctaagctgtttcaccaggccacgattcaggaaacgctttgggattcagcttctgttcttgtgaaatgggaagaatccctgtggtgagctccagatgagagcacaaaggggaacaggggtgcccgcggctggcacgccatggctggcacgccatggcactcagtggggtcaccgccccctcctgctgtcccacctccaccctgcctgctcttctcctggaatgactccttctgccagctctcagctacccaggccagaggcccaaggctcccacatctctttagctactaattctggtagatccccttttggaaatagccctcaaatctaccccagagctactgtcaaagttcagggctccatctcttttggtttttttgaaaatattttttcaaattaattatttgttggccgggcgcagtggctcacacctgtaatcccagcactttggaaggccgaggcaggtggatcacctgaggtcaagagttcaagaaccagcctgaccaacatggtgaaaccccatctctacaaaaatacaaaaattagccagggatgatgctgcatgcctgtaatcccagctactcgggaggctgaggcgggagaaccacttgaacccgggaggcagaggttgcagtgagttgagatcacaccattgcactccagcccaggcgacagtgagactccgtctcaaacaaaaaaaaattatttgtggaggcagggtcccactatgttgcccaggcctcaagtggccctcctgccttggcctcccatagcactgggattacaggtgacagccaccgcgcccagcctactttttgtctggccaagactacctcagccttcttttgcctcccaatctgtctccagttggtggctgaagtgacccttctggagcaaaaccataatcatatcactccctcttttaaaattctgtgatgggtcaggcatggtggatcacacttgtaatcccagcactttgggaggccgaggtgggaggactgcttgagcccaggagttcaagaccagcctgggcaacatagcgagaccccccgtctctacttaaaaataataaaataaaatgaaaagaaaattttttttgagatggagtttcgctcttgttgcctaggctggaatacaatggtgggatctcagctcacggcaacctccacctcccgggttcaaccgattctcctgcctcagcctcctgagtagttgggattacaggcatgtgccaccatgcccggctaattttgtatttttagtagagacggggtttcaccatgttggtcaggctggactcgaactcctgacctcaggtgatcggcccacctcggcctcccaaagtgctggaattacaggtgtgagccactgtgtccggccaataaaatgaaattttatgatggcttctgcgatctggccaaattcctcagctaaatagtttagttctttctccctgtggcctctcctcccaccatgtcacctgtgaatcccacactgcccccaccccgacactgtctgcaggtgaacagatcagttttctcagccccaaatgtcagccccaccccacacctctgcctggcaaacatcactcaccggtcctcagagacacctagtcatttattccatgagtccaccacacttgagaaacgcttcttttcttcgcgagcacgcctaccctgtgctagacagtgttcctaagggctttcaaacataaagtcttttgttttttgtttttgagacgcagtcttgctctgtcgcccaggctggagtgcggtggcacaatcttggctcactgcaacctccgcctcccaagttcaagcaattctctgcctcagcctcccgagtagctgggattacaggcgctcggctttttatttttttaattttttttattttttgtatttttagtagagacggggtttcaccatcttggccaggctggtcttgaactcctgacttcaagtggtccacttgcctcggcctcccaaagttctgggattataggcgtgagccactgtgcccagcctccaactcctggccttgtcttcctcccaccctggcttcccagagtgctgggattaacagacatgagcctccacacctggcaacttctttccatttttcactgattctctgacacatcctcattgagcacctgcactgtgtggggtgttaataattgctaggcatggaggcaacagcgtgggcagctctttctcttacttgtcaggctttagcctatgctgttgcaggactgtgccttggcctggaagccccttcccttatcctcatccccaatctcccccttcagctcttgttcctcttgcaggtcttcccttaaacatcacttcctcagcaggggcctcacagacacgcccggaggttagatcctggtccctctgtgcttcctgttcttcccccatcatcacagtctacggctgtttcctctcgatgggcaaagactgtgtctggccattgagttttctgctatatccaagtgcttcgtatactgaaccatataaatgtgctgcttttattggtcaaaacggccaaatattggcaattttatattggttagcttcatagtatgtgagctaggatacttatcccatcagagaggttgcgtagcacagtgaatcagagcccaggctctggggccgcacacctgaggtccagccctggctctgccacttgtcactaagtgattgtggactggagacaaccctcaggggccttgggttcctaatctgtgacagggatgacaataatgacctcctcgtgctgttataaaatacagaaatgtactaaaatacaaaaattggccaggcatggtggcacatgcctgtaatcccagctactcaggaggctgaggcaggagaactcaggaggcagaggctgcagtgagtctacttttattgccaaagctcgggggtccatcccttttccattgcatgccactgcactccagcctgggcaacaaagtgagactgtctcagaaaaaagaaaaagaaaaaaatgtttaaaagccaggagtttgagaccctgtctctattaaaaaaaaaaaaaattaccttggcatggtggagcagctactcaggaggctgaggtgagaggaccacatgagcccgggagttcaaggctgcagtgagccatgattgcaccactgcattccactctgtctcaaaaagaaagaaagaaaaaagtcaagagaactggagctgaaaccatgaaaggtcagttttcagcaggagagtgatcaaagaaaaccagaactagacagtcgttaaaatagcaaaaacatattgcattccagactattgctgtaggggaagagtgaccttagatcagaactgggctgaactctacaccatgggggttatagccaacgagcagagttgggggcagtggatgggacattaccatgagaaagcactgggggttgggggtattctgacaagaccaacctaaagggattcttgctgagggcaggccaaggtggtcagacagcgcctgggggagagtggagaatgaggacccccatcagggatcgggggcaatcagatgtggaggatgagggactggctaagctgacttagcagtattcttgctaaaattggacgatgcagaggtgaacacggaagtccaaggcctaactggaaaagagctgagggaacctgagtgaggtttggctatagacagaacctctgagtgagcccatcaaagttactttatttatttgtttgtttattaatttatttaagacagagtctcactctgtcgcccaggctggagtacagtggtgctatctcggctcactgcaaactctgcctcctaggttcaagcaattctcgtgcctcagcctcccgaggagctgggattacaggcacatgccaccacacccagctaagttttgtgtttttagtagggacagggttttgccatgttggacaggctggtcttgaactcctgacctcaggctaattttttgtttgtttttattctctttttttttttttttgagactgagtttcgctcttgttggccaggctggagtgcaatggcgcgatattgactcactgcaacctctgcctcctgggttcaagcgattctcctgcctcagcctcccgagtagctgggactacaggcgcacaccaccatgcccggctaatttttgtatttttaggagagacggggtttcataatattggtcaggctggtctcaaactcctgatctcaggtgattcgcctgcctcagcctcccaaagtgctgggattacaggcgtgagccaccgcgcccagccttttgtttgtttttaaatttaactttttttttgagaccgaattgcactctgtcacccaggatggattgcaatggcgcaatctcagctcattgcaacctctgcctcctgggttcaagagattctcctgcctcagcctcccaagtagctgggattacaggcgcctgccaccacagctggttaatttttgtgtttttagtagagatgaggttttgccatgttggacaggctggtcttgaactcctgacctcaggtgatcaacccaccttggcctcccaaagtgctgggattacgggcatgagccaccatgcccggccttaacttttatcttaagttcaggggtacatgtgcaggtttattatataggtaaacttgtgtcatgggggttgtacacattatttagtcacccaggtattaagtttagtacccattagttatttttcctgatcctcttgagggaagagagagaccctctcatattgtttcatactcagaaaaggaaagagaagcgaaactaaaggcaggtagcctggtgcctaggaaccagaccggaaaccaaggaaccagacccgaaatcaggcctgggcgtgcctgacctaagcctggtagttaaaattcgacccctgacctagcaactgttgttatctatagattccagacattgtatggaaggacattgtgaaacctcccgttaggttctgtttcactctgaccaccggtgctcgcagcccctgtcacgtaccccctggcttgctcaatcacgaccctctcacgcggacccccttagagttgtgagccgttaaaaaggacagaagttgagcacctgaagagctcggattttaagacgctagcctgccaatgctcccagctgattaaagccactcccttcactatcttggtgtctgaggggttttgtccacagctcgtcttgctacacttgccctcctccaaacttccgccctccaataggctccagtatgtgttattcccctctatgtgtccatgtgttctcatcatttagctcccacttataagtgagaacacgcggtatttggttttctgttcctgcgtttgtttgctaaggataatggcctccagcgccatccatgtccctgcaaagaacgtaatctcattcttttttgtggctgcatagtattccacggtgtatgtgtaccacactttctttgtccagtctagcattgatgggcatttaggttgaatcatgtctttcctatggtgaatagtgctgtgatgtgtctttataacagaatggtttacattcctttgggtatatacccagtaatgggattgctgggtggaatggtatttctggtttttggtctttgagaaattgctgcactgtcctccacgatggtttaactaatttacactcccaccaacagtgtataagtgatcctttttctttgcaacctcgccagatctcggtggtcaactcctcccactccccaggcaatgctgatttgctctgtgcctatagttttgcctttcccaggatgctgcgggaatgggatcatacggccttttggatctggctccttttagttagactgatacatttgagacaggtccctattgttgtgtgtatcagtagttggtttcttctttttttgagatggattctcagtctgtggtccaggctggagtgcagcggcatgacctcagctcactgcaaactccgcctccctggttcaagtgattatcctgcctcagcctcccaagtagctgggattacaggcacatgccaccacgcccggctagtttttgtattttttcgtagagatgggatttcaccatgttggagaggctggtcttgaactcctgacctcgtgatctgcccaccttggcctcccaaagtgctggaattacggcgtgagccatggtgcccagcctgcatcacaggttgtttacccaatactcaccagttgcagaattcaaatccattttttaaaaaatcagcctgaaaaaaaaagaaaaaaatcagtctggccaggcacggtggctcacgcctgtaatcccagcactttgggaggccaaggcgggaggatcacctgaggtcaggagtttgagagcagcctggccaaaatggcaaaaccctgtctctactaaaaatacaaaaattagctgggcgtggtggcgggcacctgtaatcccagctacttgggaggctgaggcagaagaatccctggaacccgcgggacggaggttgcagtgaggtgacatcaggccacttcactccagcctgggcaaaagagtgaagctctgcatcaaaaaaaaaaaaaaaaaaaaaaaaaaaaaatcagggtgggcacagtggctcactcctgtaatcccaggactttgagaggctgaggtgcgaggattgcttaagcctgggagttcaagacgaggctggggaatatagtgagacccccatctctacaacaaaaaatatacaaaaattagccgggcatggttggtgtgcgcctgtagtcccagttccttgggaagctgaggcgagaggattgcttaagcctgggcagttgaggctgcagtgagccatgatcgtgccactgcactgcacctagtttgaatggagtgggagtgggggattaggctctcctccctgccgtttgctcccaggccttttccgtagctggatgtgaccaacagagacagtgcccagcctcagtatagctagctcttagtggagggacaggagccatctggggcagatgtgggagagaatgtggcgaaggagagccgggtgcagtcaaggaggcttgtggctcggaggggaggtggggtgagtgagtggagactcagcagcttggctttggggaagtagacaagagagggccctctttggagagcggagcaagccaggatgtctggccttcacttccacttggaacagaagtgtgctgtgtgcgcgtgcttgtgcgtgtgcgtgcacgtgtgtgcgcgctaaatcaaacaccctcgctggctctgtgttcccctcaaggggaagccaactccacggatggcgggggtccattaggctgcaggtcttctccctgccgatagatggcgctgttgcaccgcgcctgggtttgcctctgcccgcagccatgcagggcccatcacgggctatgcctaccgcgcgaggggccttcaccatgtccactatccttatttatttatttatttatttatttatttattttttaagtgtgggtactggccgggcgcggtggctcacgcctgtaatcccagcactttgggaggccgaggcgggcggatcacgaagtcaggagattgagaccatcccagctaacacggtgaaaccccgtctctactaaaaacacaaaaaaattagccaggcgtggtggtgggcgcctgtagtcccagctactcgggaggctggggcaggagaatggcgtgaacccgggaggcggagcttgccgtgagccgagatcgcgccactgcaacagaacgagactatctccaaaaaaaaaaaaaaagtgtgggtatatagtaggtgtatatatttatggggtgcacattgataaaggcatgcaatgcataataatcacatcatgggctagatgcggtggctgacgccgagatcgcgcctctgcagtcgccaggccactgcaggcgccacagtggcgacagagcgagactccgtctcaaaaaaacaaataaataaataaatcaggttaggccgggcgcagtggctcacgcctgtaatcccagcacttgggaggcggaggcgggcgaatcacgaggtcaggagttccagaccagcctggccaacatggtgaaaccccgtctatactaaaaatacaaaatttagccgggtatggtggcaggcgcctgtaaccccagccactcgggaggctgaggcaggcgaatcgcttgaatccggaaggcggaggttgaagcgagccgagatcactccattgcactccagcctgggcaacaagagtgagattctgtctcaaaaaaaaaaaaaaaaaattacatcatagagaatggggtgtccatcccctcaagcatttatcctttctgttacaatccaattgcattcttttagttatttcgaaatgtacagttattattgactgtagtcaccctgttgtgctagcaaatagtaggtcttattcattctttctattttttttgtacccattaaccttccccacctccccatcatccttttttttgttttgagacggagtcttgctctgtcacccaggctggagtgcagtggcacgatctcagctcacttcaacctctgcctcctgggttcaagcgattctcctgcttcagcctcccgagtggctaggattacaggcctgcgccactatacttggctcatttttttcggggttttgccatgttggccaggctggtcttgaactcctgacctcaggtgatccacctgcctcagcctcccaaagtgctgggattacaagcatgagccactgtacccagccccatcatcctcattttatttattttttatttttattactatttttttaggtggagtcttgctctgtcacccaggctggagtgcagtggcgtgacctcggctcactgcaacctctgcttcccgggttcaagcaattctcttgcctcagcctcccgagtagctgggattgcaggcgcctgccaccacgcccggctaatttttgtatttttagtagagacaggagggttttaccattttggctaggctggtctcaaactcctgacctcaggtgatcctcccgccttggcctcccaaagtgctgggattacaggcgtgagccaccgcgcctggccagactgattttttttttaagtgaatttgaaagctgcaactggtgagtattggataaacaaactgtgatgggattgcaggtgtccacccccaagcctggctaatttttgtatttttagtagagaccatgttggccaggctggccttgaacccctgacctcaagtgatctgcctgccccagcctcccaaagtgtttgggattacagtcgtgagccaccgcacccggtcagaagtttaatttttttttttgagacggagtcttactctgtcaccccggctggagtgcagtggcctgatctcggctcactgcaagctccacctcccaggttcacgccattctcctgcctcagcctctggagtcgctgggactacaggcgcccgccaccaagcctggctaattttttcgtatttttagtagagacggggtttcaccatattagccagaatggtctcgatctcctgacctcgtgatccgcccgcctcggcctctcaaagtactgggattacaggcgtgagccaccgcgcccggcccagaagtttaaatttaactaggtgcccagtgatctcatcaagcccacagcactccctcaccctcgcccccacaacctcccttccccccacgccccccttcctcaccgcagtcccccccctgggacccctagatcttgaggctgatgggccagttcccagtttcactggttgttaaatattttgacagtgacccctgacagcaggagaggcagccaaactcaacagctgttctctcttccccccaggcctggcgctgctgctgccgcccgtcaccctggcagccctggtggacagctggctccgagaggactgcccagggctcaactacgcagccttggtcagcggggcaggcccctcgcaggcggcgctgtgggccaaatcccctggggtactggcagggcagcctttcttcgatgccatatttacccaactcaactgccaagtctcctggttcctccccgagggatcgaagctggtgccggtggccagagtggccgaggtccggggccctgcccactgcctgctgctgggggaacgggtggccctcaacacgctggcccgctgcagtggcattgccagtgctgccgccgctgcagtggaggccgccaggggggccggctggactgggcacgtggcaggcacgaggaagaccacgccaggcttccggctggtggagaagtatgggctcctggtgggcggggccgcctcgcaccgctacgacctgggagggctggtgatggtgaaggataaccatgtggtggccgccggtggcgtggagaaggtgctggtcctgcctgtccctggtccaaccccaccctcagcacacccctcccctcccctcccctctccagagcctccagccatgaccgggtgaacagccatggcctggagtcagcaacacaagactcttcccacctcagctcctccatctgagctgggctcagttgagctcatccagctaagctaaaggggagctgggcctgcttttctttttctggagatggggcctcagtctctccagtagctggatatacaggcatgctccaccccactggctaatttttgctttttttttttttttttttttttgagatggagtctcactctttcacccaggctggagtgaagtgatgcaatctcggctcactggaacctctgcctcctgggttcaagcaattctcctgcctccgcctcccgagtagctgggattacaggcgccagccaccatgcccggctaatttttgtattttttagtagagacagggattcaccatgttggccagactggtctcaaactcctgacctcaggtgatccacccacctcggcctcccaaagtgctgggattacaggagtgagccactgcacccagctgccttttttttttttttttttttttttgagatggggtctcactatgttgcccaggctggtctcaaacttctggactcaagtgatcctcccaccttggccacccaaagtgctgggattataggcataagccaccatgcctggttttggaattggttctttatctttgttctgctgctgcgtggcgtgatgttcaagagcaaaggacaacacaggggaagccagtgtcactggcaccacagccttgagcccatctctctagccctctgcaccttatttcccatctgtgaaatgcccttaaacaccccttctaattttaatattctgagtcaaattgagctcaggtccaaatgccaaatattgctgatattcatccactttttgacccacaaaagtggtcattttaacctacaataaaacatcctggctcagtggctcatacctgtaatcccagcactttgggaggcccagttggggggattacttaagtccaggagtctgagaccagcctgggccatatagcaagattctgtctctacaaaaaattaaaaaattagccatgcttgtgggcaagcccctgtagtcccagccacttgggaggctgaggtgggaggatcacttgatcccaggaggtggaggctgcagtgaactatgactgcactgaactccagcctgggcgacagagcgggaccctgactcaaaaacaaaacagtggccaggtgcggtggctcacgcctgtaatcccagcactttgggaggctgagatgggtggatcacgaggtcatgagttagagaccatcctggccaccatggtgaaacgtcgtctctattaaaaatacaaaaattagctgggcatggtggcacgcacctgtagtcccagctactcgggagactgaggtgggagaatcacttgatcccaggaggtagaggctgcagtgagctatcattgcaccactgcactccagcctgggcgacaggttgagaccctgtctcaaaaacaaaacaaagcaaaaacaaccccaaagtctggtttccttattaaccccaagttcatggtccacccgaagcttttcaaatgtcagtcccggctccccgcgccccagctgcagtgctgggccctatcgtcaccctcgccctcccggctccctgcgccccagtgccaggtgctgggcccagtcctcacccttgtcctcccggctgcccagcaggcggtgcgggcggccagacaggcggctgacttcactctgaaggtggaagtggaatgcagcagcctgcaggaggccgtgcaggcagctgaggctggtgccgaccttgtcctgctggacaacttcaagccagaggtaaggtgggctctgcctccggggagggatctgtggtgggctcttacctccccttggcttgtgtcccgcaggagctgcaccccacggccaccgtgctgaaggcccagttcccgagtgtggctgtggaagccagtgggggcatcaccctggacaacctcccccagttctgcgggccgcacatagacgtcatctccatggggatgctgacccaggcggccccagcccttgatttctccctcaagctgtttgccaaagaggtggctccagtgcccaaaatccactagtcctaaaccggaagaggatgacaccggccatgggttaacgtggctcctcaggaccctctgggtcacacatctttagggtcagtggccaatggggcacatttggcactagcttgagcccaactctggctctgccacctgctgctcctgtgacctgtcagggctgacttcacctctgctcatctcagtttcctaatctgtaaaatgggtctaataaaggatcaaccacatggggttctgcggtgataatgagcacatagtgaggggtcagcaaatgtcagaagttacctgggacagccgggcacgatggctcacacctgtaatcccagcactttgggaggctgaggcgggaagatcacttgagttcaggagtttgagaccagcctggccaacatggtgaaaccccatctctaccaaaaatagaagaattagctgggtgtggtggcacgcgcctgtaatcccagctacttaggaggctgaggcaggagaatcgcttgaacccaggaagtggaggttgcagtgagctgatggtgccactgcactccagcctgggtgatagagcgagactctgtctccaaagaagaaacaaaggaaagaaagagagaaagagagagggagggagggagggagggaaaggaaggatggaaagaaaggaagaaaggcaggcaaaagccccagacaggccaaaaccttcatccttcatgcacccaacctgtaccaaacaccagcatggcctggctgtgagtgcacagcagatggaggtttgctgggcagagacactgggctggcctagacactgcctttggtgataccctaaaccaaaggggccagtcccacagtaagaaggagaccactactactcctgctgccctcctccccccaccttgcctagtttacaagacaggaggaaagagagaaagcaaaaagttagaaaacaaaacaaaacagaagtaagataaatagccagaagaccttggcgacaccacccggccctggtagttaaaaaaaagtaacaataataataatatcaacccctgacctaaactacttgtgttatctgtaaattccagacattgtatgaaaaagcattgcaaaactttctgctctgttagctgatgcgtgtagcccccagtcacgttccccgcttgcttgagatatcatgaccctttcacgtggaccccttagagttgtaagcctttaaaaaggccaagaatttctttttcagggatctcagctattaagatgcaagtctgccaatgctcctggccaaataaacctcttccttctttaa

SEQ ID NO: 266 - DNA, 33085 bp, Homo sapiens
cggctgtgattggcgcggcgggatcactggctccgcgagcctggcccgggggagtcggctggagccggctgcgctttgataaggtcctggcaactcagtaacagcccgagagccgggaaataaaaataacccctcagagcgatggatttcggggccgcccggcggccgaggcgcccgccgaaggccctgctgtaaaaggtgggggtggaagctcggccccagcggagccgcttcaaagaaagcccccctcttacagggggcgaggtcgcgccgagccgcggcgtgggcgcggggggcgggagggggcccggccaggcggaggccgggcctggaggggggcgcgggcggggcggccctgcggagcggtggcggggctgcggggggcggcccggggcgcggccggcgcgtacctccctttcaggaccgtgcgctcggctcgcgcctttgaagtgcacagttaaatccacagcgcagtttttgttggaagcgcccggaggacatttggtgcgccgagtgactgctggaaacaggacctgcgttgaaagccgggccgggcgggggcggaggcccgctcggatcttttgcataaaaggggcggcggggcgcgccgttccccctccccggccggtggctttcgctctgaacccgggattgttgtttcccgcaccccctcccccgccgcacgactccccatgttccccgacgccgcggccggcccgggggggcccggggctgccgccgcgagccgagccgggggccggggccgggcccctgccaggggcgcctgcgaggtctcgccgccgagcgcgcgcggggatcaatggtgagtgccgaggccgaggcggccgggcggaccgcgcgctttgatgtgcggggcggccctttgaagttggcaggccggctatttcggggcgcgctaggggccggcgcggaggggagcggcggacccggcgcccagcgttccggggggcttggccgggcagccttgcgcgccctgcgccggagccccctccccagcgcggtgaccgggttggcggggggcccagagaggagacttatccgagtggcggcagtggcgggggcggagagggggcagataccccccgggggtcgcgtcgctgtcgcggttatggatgtgagtcggcgtgtgagtgcgcgcgggagtgcctttgggaggtgggatgaaagggtagcggcgccccccgcttgccctcccccgccccccgcctctcctccgccccatcctctcctcctacttctcttccccctccccttttcccctccctgccgcgggtccgcgctaaggggcccacagcgctggcggaggctcagtctgcgcgcaggaccggcccaagtccggggcgcccgtgtccctcgcgtccctcctcccggcccgggcccctcgcccgtggccgccccggccccttttgcggagaggcagagactccgcgcgtcgccatttctggactaggctgctgctttctgtgctttttctgcgggcgcctctgcaaacggcggcgccggggaccgaccccccgcccgggctcggggcgctgctggcgtgtcccggggttccggcctcgaggtgtgcccgccagggctctggaggcgttcagttgcatttgggccgggggaccgggccggaggggctcggaggacatgagagcctggcttcggcggccttcgtcttccaggtaacggggccgctccacctcccaccgcccgggtagcgcggtgccaacggcagccccacttctccgtgggccgcgccgcccagccccgcggctcgaggctctggtcgggttcagcgtgcacccatcccagatccggggtccctggcttctcgcccggggttgcaccccgttcagcccctacccttcttagtttgatcttttccgtgctagggaaagcagcttgtttattggttagataagacttttttctttggaaaaaagacaggcttgaaatcagtagagtttgggattcttggcacaggcagtagtggcgtgagacggctggtgatccagttttgtaggtttcgcggatccgggaggtgggttgggggcacgggggcgacggttccgaggcttctcagctctctctcaaagtttgaagatgaaagtctcccctgagtgagttggtttctggtttggggggaggtcagggaagacagaggtgttgactgagctggattcttggtgggggtagggggcgcgtagcgaacactcaaatctgagttggggagggggtgtttgcgtgctgaatctgggagtccgggagcccaatccgcctatgctgggcgggcttctcttgggccaggatcttctgaatttttaaggagtgggaagagggagcgcagagggagggggtgggtggggagaatgggaaccagatgccggggaagggcacgtttggagctcgagttatctgtgcagggccgagtggggaaatataccgaaattggtttcacctgcacacagcctagcggctgggagtgcgcctttttggagttgatggtatcgggggaggggaagggagggaaggcgaggcgcgggctgagctgccctgcgtgcgccctggccgagtgggtttttggaaggttgtgtcttacacctccagtgtccccctgccgtccccagctcttgccttcctctcaccttccccgcctctttcccaacagctccctcccacccccaaccccgaaaagtgtgcagggagctcagatttcgcttttgaaaagcagcgcctgatactttagatgagcacctcgcagatagctgggttgcttgatttgaatttgaggagttgaaaagcctgtttactttcttgctttgatgttgggtagatctggttttgattagatcaatacccttttctctctccccacctccccccttccttttctttccagagaggaggttcagatgagcccctgctgacttgagagagacagagagaccacgccgattgctgagaggaactggaagaagaaaaattcccagactcagtgggaagagctccctcaccatgagtagcgctatgttggtgacttgcctcccggaccccagcagcagcttccgtgaggatgccccgcggcccccagtgccaggggaagaaggggagaccccaccgtgtcagccaggggtgggcaagggccaggtcaccaaacccatgcctgtctcttccaacaccaggcggaacgaagatgggttgggggagccggaggggcgggcatctccggattcccctctgacccggtggaccaagtccttacactccttattgggcgatcaagacggtgcttacctgttccgaactttcctggagagggagaaatgcgtggataccttagacttctggtttgcctgcaatggattcaggcagatgaacctgaaggataccaaaactttacgagtagccaaagcgatctacaaaaggtacattgagaacaacagcattgtctccaagcagctgaagcctgccaccaagacctacataagagatggcatcaagaagcagcagattgattccatcatgtttgaccaggcgcagaccgagatccagtcggtgatggaggaaaatgcctaccagatgtttttgacttctgatatatacctcgaatatgtgaggagtgggggagaaaacacagcttacatgagtaatgggggactcgggagcctaaaggtcgtgtgtggctatctccccaccttgaatgaagaagaggagtggacttgtgccgacttcaagtgcaaactttcgccaaccgtggttggcttgtccagcaaaactctgagggccacggcgagtgtgaggtccacggaaactgttgacagtggatacaggtaagactttgacgggggcgggtgggctgatgctgtggactttgcagatgttttaagtatggtggatgggtggatgggtgtgctgcagagactgacaggtctgttgagttaggactgctggccatgaaccctttttgatcttgctttttgttgttgaaacagggggaaagcgatgcacatacagtaaatacctgcagtcttccagtgctgacttcaaacagtggcaagcagtattcactaatgtgggttacttattatcccgggctagtgtctcagaagaggttgagagagagagagaggacagcagcttttgatgcctctgagtcaccagatccactaagcgccggttttggaaggggtcacttcaccactaatcagtagagggtggaattaatgtggctagggaggcagctgggttgtggtggaggcacaggaaataatatgtgcacccattgaggggtaagtgggatttttttttgaacttttctgttaagataagagccagcaattggcttaactgagcttgtggttccctttgtagaattagatatttacccagcaagaaaggcctctaactagggaaggtcctgtgactttcccaaatgaaggacccttacctttagagcttgctggcatattaatccaggttttaaatgctcatgagtccgagggtcagacttcagttgattattttgttagtgctgatggagaagagatcttggcccgggagtactggggccctggagtactttctctttgaggcttcaaagacaaatagttctttgcagaatggccaagtcttaagattcttgacctttggaggcaacttcagacctcttgttagaatgagtttttctgttttctcccctcctcccgacttccaaatatccgaaaagagaatgagcctcttaattccggggtgtggttttatgacaggcaggggatggggctgcacttgactgctctctgaatgatttatcttgctctctgtgtgaatttctctgtgtgttaggggcccaggatgcggtctgatagctgcctctggatttccctttctctgtaggatgtggtctctagtgcccagcagcaggaagagaggtgggcaccagatggttgatcttgagcctctcagggtggccaggtctgagcctagcgggccatgattttaggggcggcagagagagttgactgttggcgaggagaggaagggcttgttctccaaccaccagggggcgcgcttgtggcttgggaaccagttttactcagacatctggtctacacctaagtggaaccaggttgacttttgcaaggaaacacaggttccagggaggtgtttcagtgtctttatgcttgtggagtcaagttgtctgggaggaagatcctgggtctggcctctgcagtaggtcagtcgccgggcacctgctacgcctgcccgccccattatgagaccatttgggtaagcctctggcgctggcctccttgccctctagcctggcagccagagctgagactacttaagagccgtggtaaaggctgcttctccaggggcctcctgactggggcttctgtgtctcccactgccgggaccagagtgtcaccttcgtaaatagcacagtgtgtggttttggacgccctccccaggcagggctctgctgtgaaccctcccctttgtgggtgggcagttgcgactcagcctgggcttgcctcatctgggatattaccaggatgcaactcatgaagcttttgagatccagaaggcagggacagaagctcctgttttccagggctgccttcttggctgtgaaccgtggacatcactgataaagaggtgacagcttgtcattgacctgagagtttccatacgagattcacgtgtgccttctcccactgttgggttgagatgaagcatcttaaaggactctctgaagctcatatgtcttaactgggcatatttaaagagaatttaagacatagccagatgatctcacatcattttaacgtgcaagatattcgagtgtgtgcacagtgtatggaaaggtctgctgactccttattcaaaggcttgcattccagcccggtccaccacttactgcttgggtgttgaagcctttctgaatggcatgtgcccatctgtaaaatgggtgggcaccattccttctgtctgtgtcataggattgttattaggaccaaaataataaacatgaaagccttttgtagagagaaacgttttgaaccgccgcaaagtgttataattagtataattagtaatgatgatgtaaataggacaaccaggttgggatgtcacttttaaagggtgactcttggcttagcccattttccattgtaaggttttagagtggccccctgacccccatgcctcaactttcttattgaactgaagtctgtttttccagctagttcttggaatgtagagatcccatctaaggtttaagttccccccttccctctcccgcacactcactcattctgcagagtacctggcatctgggatgggcttaataagttagtaaaatgaatggaacagaaacgtcagtgctgctgaggatggtctttcttcatcagctgctgaggagcggtcttggcagccggatgcctggggcactggccaggcttgcaagccctgtgtttacctcgggcactcaaaggagcctcgtttttaacgacttgtttgtgtccttactgatttggtgtcaggtttaatataaatagttggggcggaagagcaggaattatcctcagagggcaggactctggtctgagtggttgagggggatgcctgggcttttgacaatggctataaataacctagagcaaaagcaacttgttggtaggagcacgtgtaaaatccccggcacacagacacacacacgcacagtgtcgaggtgtgtgcgaaggggggttgtgggattgggcactgggcccagcatttattttggggaggagaataaggtgctgggtgcacagagccctccctgtgtcctcgcctttctgcacgggcccttgtgtgtcctgcccaaggtggggctcatctgcctcccattgggccctctgctctggcctcccttaaaagaagtcgggcccagcagatggccctctgctggctccgagtgctgcttccagttctctgaaagaactcgctgatgaggcccgtttttgtgcggagccattggaatcaagcttggcttcaattatcaaagaaaatgatgccataggaaagatatgctggaagcagtagtccacaattagaggatggaagctctggtgagggcagtttgctaagatccacttgtaaaagtttgcctgttttcaaaaggtcccgttgcccagtgctgttggagtcctggccccttgccgagtgtcccttgatcttgccttagaaaatgcttgttgaagagggtattgccttttgggcagtgaccttgtgagtaaattttcagagggctcttggaaagccctgaacgcacagacttagaagcatatacttttgaagttgcattgttttgagaagggaacgtgaggaggaggaggaggaagaggaagaggaggagaaggaggaggacccctatggtcagttctgtcaggtcagttctgtgctccctgcctggaggctcccctctggtttatggggaggggcagggccacagcatctcattaagaggagataagaacaggataggggaaaacagaaagcagccggcacctcctttccctgaaggttccgggggtctctgccacctgcaggctgaaaaccctttgcttactgaggttgcaaaccaggtctgtggatgtgaggctgatgcagaagctgcagcataggcctctactctgtgtaggaatttaaaatccttgcagcaactggaagcacaacagtcctgaggaaataaagcatctgggtacaattactgtagcgtggtttgagtttcctccccccccccccgcctttttttttaagtaatcacaagaaaacagccccactccgttttcttaaaattatgtggcacttttgacaaaggtctgggttctgaaataccgagtctctgcctctccccacaaccctgcctcctttctctgccctgtcttgttatgattgtgggaaaatccaagtactttattgcagtcaactgagttaagagcagtatattccatttttaattactggtcacacagtagtcctctatgttggaagtgaagggagacaagtttattttgggatccatgtgttaaacaacgagtgcaaagccgtgtgagcacacatagggtttgagttaggtgtcttttttgctgggaggaaggaattttctattgagtcattttctccccacagaggttgaagtatagctcttacagtggagacatggttgatgtgttaataccaccaagatagcaggactgaaggcatggaagaaagagtgtttgaatgctatttaaggctgttttggcttttttggtgttgcaccatgcctgttaaactaaaaaacttttccagtgacccatctaatggtcttaggtcctttaaggagagtcagcaaggttttcagtcactgccacgtgccactcactactttcagcgtcggagattcgtgtgaggacagggctgtccctcatggagcttacagtctggtttcacaggacaggtgttcaacatggaaacaccagtgtccagtcattatagatcatgataaagatgatgaaggaaattagggcagttgagaaaatgggagctctctggttttttgtttttgtttttgttttttttgagatggagtttcattcttgttgcctaggctggagtgcaatggtgtgatctctgctcaccacaacctttgcctcccgggttcaagcgattctcctgcctcagcctcccgagtagctgggattacaagcacgcgccaccacgcccggctagttttgtatttttagtagagacggggtttctccatgttggtcaggctggtcttgaactcccgacctcaggtgatccacccatctcggcctcccaaagtgctgggattataggcgtgggtcaccgtgcctggctggggctctctgtttttgttggcactcggttttttcttggaattttcctgtgatttcccccaaattactgtgcctttgttggttcatttggaggacctcagaacttggtgcagaggccatgatccaactgcctgctcttcaggtgggtgcccacctctggaggggttgtgactcagcccagcagtgagcactgcagccaagccggcagcagtgcccagcctctgacttctggtccctactgagagtttacagaatgtggcctcatcactggattcctaacaacaggaaaaggccccaaggaagtcatcgtgtgcatcctgcttcaaggcagtatccacgccttacttacgcacccagatggctgggcactttggcctgttttaaagacttgggtgatttcacagcctgtccccacctactttatggatttcctctgaccatttagaagtatttttttctctctaacttttgaagtctatttccccttgttcttcctttagtggggatgctgaacagagagtcccccttctcaactacgaggcctttttcactgaatcaaccttctcttctccagaagaatgaactgttctttttactctcaccactcctctctgcccttggtgttggggaattccggattgaggacacatggaccaggaggaaggcctggaagatcttaccgttctcatttaattttcaccaaaaaaatcccaggaggtcgtgagacttcttgccctctacagatatgagaacagggtcagagtgtccaagtgacggtcacaagtcacttggtcaaaagtgttgaggggttcatgtgcagtgctcctggtctgcaccttctggtcagttctatgcctacagcatatttctaagatctgacttgatgcagtcggacaggatccagggcacagctgtggtccggctcctctggccaagtctgacaaggcctttggcccacatggtgctaagttacctccttgggtggttgtgatgattacaggggtcccttctggcttaaaaagtttatggccctgtaactttttgtgtgtgtttggtgactccaacaagcgcaaactccttaaaggcagagactgcctctcctaccttcttttccatcccaccatcccctgttgagacagaccctcacaccaaattgtggcggtggcttcccccagggctccctgcctgtacctacccctcctttccatccagtctggtgacagaccttggatcctatgtgctgatgggaatgctttctccctgccggtcccctggcacccctgctgtcccctggcctcctggcccctccccatccagttaagacaggactatgaccttgcactgaagacctacgtcccttgccaggccttcttagcctggctaattagacccctctctctccctagtctagggagagcttttcgctacctttcccttttttccctttacctagtcctgggttgtcatctcctcaaattcctgctcaaccatgagtcccatctgccatctgtcccagggagtcccgttagtcccattagtcccatcagtcccatctgtcccagggagccgtccccaactgtccctcctagaaatgttctatccgtcatctgggttacctgtactaaggcactcctttcctgctttttattctgtgagaacttggaaacatgttgagtctagtctttgtattgggaggcagtttgattgagagccacgtgactcaatccatgcccaccagttccagctgtgtgatctgggcaggctgctggaattctggactccaagggcctcatctgtagaatgggcacagtccagtgctccttctcccctcctcgtgagcctgtgataacactgagcgtacctccctcatgacacccccacagtatggtgacatgcccccaccaggccatgggtgctggaagaccagagttcagcatgtagcaagtgagtaggagcttggtgaacatgtgcagacagctgactgtcacctttctgggtccttttcatttgccaaccccacggccatctttacagaccagctgctgtggactaatagaatatattctcttttctgagcctttcttttctccctcacttgatttctttgctgctggcatagacttggtgggaccagtggaggatgccagggtctttgtaaataggcctcctgcgacttcaggccttaacgtgcagcctgccgacctatctgcccctccccgctacttaagcccctcactggtgacacaagaggaatgcggcccagcaggagatgtgcacactggttgttctggaaggagatcaggagggtgaaattaggagccagaggccattgaaacaaaagggctggagataccggaggaggggcctgggccttcctttgaaacagctgtgttgctcatttcaatcctgctgcactagccagtcctggggagaggaagctgggggttgggggaaggggcatggcaacggctcatggcagagctcacaggtgggattggagtcctgaacgttgtcttgaacttttctgtcccgtctgtccagctcactgtgggcccagggtcaaagtgagaaggccacactggcctctagctgtttgcatctctggactgggctaacagaccccagacaaggagtttaggtacttaagatgtcttggggccctgaaattgtattctttggtgcaggattggatagggaggtggagcagagaaagatatttcatcttcactgactcgttcccctcttctattccatggcctcctctcctaaagcagagtccagttccttcctctaagtgcatttagagcttcacaggatcccctgggctgcctctggaatactctctgccctggcagacccaccactgggggcagaggaaccagcttgctttccccagggtgaaccggtggctcaggaggcctcccttttgtggcccctgctttctgcccaggtgagcaactggacctgggcagcaggttggcgttgagcagattgtgggatagtgtgctgggttgtcctggggtcacctgattacctgggtttctggtgagggtcagtgactgaaccacttttgtactttgcccataggtccttcaagaggagcgatcctgttaatccttatcacataggttctggctatgtctttgcaccagccaccagcgccaacgacagtgagatatccagtgatgcgctgacggatgattccatgtccatgacggacagcagtgtgtgagtatcctggccacccttccgtgggcttgcttgggagtggatgccacctgagcacttagccagaatcgtctgtcatcctcagctggctttgcagaccgcacctgtgcatgtatggacatcagtttggtgggaggggagtatgacaagggtatggtgctgattaaggaggatgacatggtcatctgggtagggtaaagcttagagctttgaaagttgggaggatattgtaacagaagaaaaactaaaggacagtagaagattaggatgaatgaatatttatagattccttgagtttaaaaaaccttcttctggttgtcatcatctggttgtccctgtgggaacagttgcttggctggtccagaaacccaggtatcctgtctgcagaaccaacagctgggagacaaggtggcattagaagggtctgtgtttaggtattcattgtttttggaggaaaaggcattgcaagtgggggtgagaaagccagaaatctctaaagagccacagtgtgtaatgttccgcattgttttgtttttaaatggacatcgtttattcagtaagtgtgggtggagtgttagatactctgtgttagatactgaggaccctaagtaggggctctctccaaagtagtgtctgatctggatctttggcagacagcctttgatttttgaaagtaacccaagacattggcgtggtccgatgaggtcagaaggcccttagtcaaggtaacattttgaattttaggtcatttgaagtcaagtcatggcaatctctgtggatggacagcagtgatcctcagtgagtctcatgaggagggatgtgtagctgtggcctgggtatccctgtctccggctgtcctttgaggttttggttcaggagacccagagtggagcctggggataggggatgggtaaaattccccaaaggcttctcacccaacacccggttgagattcattgttccagaaatggtcttgaaagcttttcaatgttttggagtcagaatttcgcctgctaaaggaacaattttgaaaggcaaacccattgaaccgtgtaagttctggcacacttatttagagtttgttccttttagcttcctaaaactggaccatctattattccagtttgtttgaaactatctggtttttactggccaatgtcctgttgcctggcctgtggcatgggaccagttggagggaaagttgatgaggtgagtttgggaacctactatttattttgctggtggcttttattgtgttacctcaaattcccttgttagtacagggagagatatcctcaaggtgaaagtttgaattttaataaaaatagcattttggcattagtacacgtctttcatccaatatggaaacaggaaagtacacatctttcatccaatatggagatatgagaagtttcacagaagtgagttttccatattgactgaaatttcggtatccatacttgaaaaaattgtgctttgataattttttggtggacatatttcttagaatacattttgctctgtcattattgcatagtattagacagggcataatttatctctcagttatccaaataatatcaagatctgtttgtgtactttgttgtggtatttctctcataggcaatgagggtgcatagggttatctgaccctttcccctttgaaaagtttctcttttctcttttcattctccctgctgttgtgttttgctgtctgtgtgcttgcttctagcaagcattcctcctgtagcatatattactttgtggattgtgtgggaatcttagcattatgtgtaaaataagagtaagttgaaattgattgaaggcattgagtgaatctcctaagtcaaatgcagtttacgtcagacgataagacttctgtttagttttcttagagactatttttggcttgcttcctggtccttggctgcatgtcagtccccatcattgaggtgttattctgggttcatgatgagataacttgggtgtagtcccatacttatttctgtttgatcctcccaagacccaatcaggaaggcaggcaggcagatacttgggactttacagatgaggaaataaggcctggtgcttccacagccatgcacctctgagacagacttcaggtccaggccagacacaggccctgtactttgcccgctttgcccttcccccaggcatgagcgttctcaacatgagatctgtgaataggaccggttggtcatgagacctttgagccactttgggtttcttttatttatatttcttagtaatcaagactgctttttagaaagactggttctgggaggggtagaagggagcaggttctaagttctcccctgcagcctccccatttacttcctcttcttttatccccttcccagaagaaaaactttcttttatttagaggtgactttaaagctttcacccttccccctttagctgaagcactttggattccaagcatgggggagccacttttcagggatcagaaaggttacctttgccagtccctattctaggtggcaagggttagtgtgtagttcagtgaggtccacttggatacagagacagaacaggtcaagtccctcatgtagcggctttctctttggggcacagtagatacctttgggttcctggtggcagaacctgtgagtattaataagcctatcctgtggcaaagctgccttggatggatagtgaataaaccaggaagccaggaggaagtgctgcaaggcctagagacccgtgggctcatggtgttggctctgttcgtcctggtggtgttgagtggctctgtgccctctcccaatcaagtgcgcaggttatcagattaactgtcacagttgtgcccacctgggcatttatactaattaggagtgcatttggcatccatgtggggtcactgtctcttgggcattgtctcatgctgcctctagtggggctcactagaaaacatcagaagggtctccagacttgttggcactgactcaagctgccattgggtgccaggcatgggggtctctggggccctccccactctgctgcaagcagacttggcgatgcaatgtgttctctggccgactggccctgggtgtgtgtgatcctgcccagcaccgggcggtcacccgggattcccagggctgggatcagacctcctcttcagaactctgccaattgtaggcctcgtgcagatgagagcgccgggcgagaaataaagtgtgtgggggatgaaaagctgaactgaatcgctttcagcccattgttcatcccgggaagcttagaggggataagagggtagcaggcccctttgaaatttccttgaacaagtgaataggagcgccccataaagcatgaaaagagccctggctgtttctcccgtcacaatggccagtgcgggctgtgaggggctggggaggggggctggctgccctgctgggagctggggagggaacagggctggggagggggggagagggagagagggggtcacaggcagccttcaatagactccagaaggttggagttcattagacacaaacccaggaaagcaatcgtctcatttgcgacagaaccaattaagtcctgggggcctttgcaagaggcctgggtagaagttggggcagtgctggcctgcacttggttggttattccagggagccacatgccggggcctgagtgtgcagagcaggcaggggctttaaagaaatcattgccttctcccaaagcctactgctgacttctgttttcctgctaagtaaaaagtcctgttaaagatggctgggcatttgggcctctgagaaggctgttttatgagcctgttactctgaaacctgcattctcggaagaaatggcttaatttttttttgagacagagtctcactctgttgccaggctggagtgcagtggcgcgatcttggctcactggaacctccgcctcctgggtagctgggactacaggcgtgcaccaccacgcccagctaatttttctatttttagttgagacggggcttcaccatgttggccaggatggtctcgatctcttgacttcgtgacccacccacctcggcctcctaaagtggtgggattacaggcgtgagccaccacaacctgccaaaaaaaatttttttaacgttaactgccagactcccaccaaaatccttgcagcactggaggcagaaggcttgtgggccattccagggcatcaggcttagaaggatggagtaaagagggtgaaaatgtcagaagcagcagactctttgccgcccaagtgtagccatggttagatgttgccaggaatcatgaaagctaagtcagtggtgtggaggcctttgtctcttctttctgctaggagttgctcttgtaatcaggatcagctacgtttgtatgttgcttcagctctgagtgtccccaaatcagcacaagatgattttttggtgtttcacacagggaatgtcgcgagttatttatttgtatttctttatatcttatttatgggggtttactttggacaccaggaaatgcatctgagtgaacttcaaatactaaccttttcctacaaaccaggcttttgatgttggctgtgatcagaggctgccttcagagtggttgccaaatgaagatgcgagtggacgcatgtgtgcatgagtctgctatttcaaagtcgccagaaaatgacattcaggttaggtcgggcacggtggagtcaaaaggctaagctaattggctcggctcaaatggcagctaagtggagtccacacttcaaaaccatgctccccagaaacagctgggcccggcagcaggctcgttaactaaaatgtttataattaaaggagaccgtatagggaccacaactctggtgctctccagcccacaggcttgagcagccaggaaactgatcacagacttttagagcttgaataaaagaagagaggcccccttttggaatgaggggctgttttggaagaagattcttggctggagggaattaaagccacatttccttgaaggtgcctgttaagcctttctgagcctctacaggctgacatcttccttttctgctctggttacaagttgcctttccagcagtttagtccttcacctgccctgggtaatggagtgtgtgtggtggtggtggtgggggatggggggcggggtatgaggtgcttatgaaatcatttgttccttttgccttcaatattgcagttatctactcccctccccatccctacccccatcctgttttttttttttaaccttattatatggaagaagaaaaagaggcataaaagctctaccactgactttcatctgggagaaggaagagtgaaagctaccagtggaaatgtcaagagtcttggagggggtggacgggggactcttctaggactcttgaagccttatgtcacttgtgtcatggtggggtccatggagtgcttgactcctgcccccaagactgtcaggaacagggctgaagcagagtcatccactgtctaagtccctagaagagagatggaggatagacattgtcttacagccctagggcagcagaatttggttagaccagcatgagcccaatctgtgggataccgccacccctaccatacaaggtatcttaggtgagagatggggatattcagcatggcttgggaaccacctggcgagccccatagctagtgagtactaggtggttggggaggacttcccagaaaattccacaaatttccccctcatgccttatcaatgtcaggtgactgcgtggggcttaggaaatggcatctccacattaagaccatcaggaagcttgactgctgattggggctgggaagggcatcttattgaaatgaccaagtgtaggttgttacagatgcctgttctggagtccagcagtggcttgggtatgagttgtcaatctgctactgactgtaacactaggtgagctattgagcatttctggtcatctgtaaaatgtggctcattaaggttcttatgagaatgaagtctgattataggtccaatgtctgacgtacagtagggactcggtatctatgagctggcattctcaggttggcatcagttgccttgggtgcgatttggtttctggtcaagccaggcatgcttataagtcccgttttcagctacccaaggtgaagacacagagttttgataaataatctttaggtgggcttggtcaggtgccgagcctcatgagtaggaggctgtttctcagtcatgagtagaagacgtgtttctccagcactggtcagccagctgctgcgaatccttcccacagtgctctgtctctgctccatacttacctttctttggggcagtactcacacttgggggtaagttgttgctctggatactgatctctcttctctcccttccctactcacctcagtgcaattatcgtttatgcactccttagccagggtttggttaacatacattggtttgttgatctattggaatcttcattgtcccttgtgttcctgttttctgacctaggtcagtagacttcctgaaaatgcagctatttagaattctagggcatttcagataaggagctagaggttgactagttactcctggcttgccccctgggtatttttagacattgctaattatcctatttttcttccaccctatgatgaaccagacattggggaaagggaagtagccaaacacccaatttcaatatttacagcctccaagtatgattcattatgaaaatgtttgcaccctgaggcttttgtaaataagtggcctcctgaagggacatcaatgggaaaatagtcacaccttgaccattctgcttttaagaaggaaattctttctggaaaaaatcatggcaactctaggtcatagttgtagtgaacactagctggagtggcagctttttaaaaattcttctacttgttaatgttttgtttttaaaaatataatggataggggcccatacttcttcaggtctttgcccaaaggtccctttctcaatgaggacttgacacccacatccaatttaaatttgcagcttacccactcaccagtgattctccttttcctgctgtgtatttattcatagtacatatcactaacatactattttttattttgttcattgcctgtgcctccccattagaatgtaaacttcaagagggcagttgtttgaattatgtatccactttgtctactgctctcttgcctagtgcctaggagaagatctggcacatagtaggtgctaatctttaaatggattgcacagaccaccacatagtaggggcttttctcttcatgcccacattggtcatgtgtctttgaaaattcattggttgggggtggtagggtttggagctgagagaaggggcctaaatgttatatattctttttattaatcacgctgtactggtttataaaaagaaatacatttggaaatgactaggaggttgacttggagagttatgcatgcttcactaatgcctgatttagccctctgtaggtttggttcttatccctacaactttctgccctggccctatccataaggcactggttcctggtttgaagcagtgggaacaagtgggaggaccagtggggcctgagaatctcctacttagggcacctgtaaaataggggagcctttgctctgcctgggctggctggagtgtaacccagttctaagacaacagtccgagagattaactttccaggctctttccaagttgatgcttctgcatccaaggaagccaagtttccatagatgattgatgggcaggatttaaatttgaccttgggtgggtccttccctgtgggagcaccgatggtatctggagacatgtgacactcctatggaagcatgtggccctgtcggcgggatctcaagatggcatatgacagtagcccatgtgatgtgctgaaaacatcctcgtaagcctgtggattctgtcttttcctttcccttagagatggaattcctccttatcgtgtgggcagtaagaaacagctccagagagaaatgcatcgcagtgtgaaggccaatggccaagtgtctctacctcatttcccggtgagtacagtctggagtgaggagacagctgttttctgccatgttgagtcctaaagaaaagaaatgggtggtggaatggggagaggtatagggaaggtagaaaagagcagtacctaaggtcccctagggcaaagggagagaaaagaactggacaataggcattacatggttttttgggttgtgatggtgagcacagtgatgtgattatgaggtatcagtcagttttgctataaaggaatacctgaggttgagtaatttataaaaagaagaggtttacggctgggcacagtggctcatgcctgtaatctcagcactttgggagtcggaggtgggcagatcacctgaggtcaggagttcgagacccagcctggccaacatggtgaagccccaccactactaaaaatacaaaaattagcctagcgtggtgacgtgcgcctgtagtcccagctacttgggagcctgaggcaggggaatcacttgaacctgggaggtggaggttgtagtgagctaacgccagtgcactccagcctgggcgacagagcgagactccttctcaaaagaaaaaacaaagaaaagaggtttatttggttcatggatctgcaggctattcaagaaccatggcgccaacatctgcttctggtgaaggtctcagggagctttcaatcatgatgcgcaaggggaaggagagccagtttgtaacatagcgggagaaacagcaagctgaggttgggggggtggtgggcaatgccatgttctttcaaacaaccagatctcatatgaactacagggaaaacttgctcattactgcagggagggcacgaaacacctcccactaggtgcacttccaccattggggatcatatttcaacatgagatttggaggggacaagcatcccaactatgtgagaggtttgatgacctatttttgaacctttgcattttctgaattcaaaaaaaaaattccctatcagaaagaaactgaagcacttatttcccagaaactaagaaatgctagatgatccatgcttctctacagcttggtgagctcactgtatttccactagaatggaagccctctgatgggagggagttttatctattctgttaacctctgtatgcacagagactagaacagtacctgacacataataggtgctcaataaacatttgagtgaatgaataaggaacctctgcccccccttgggacatcctcctgctctcttcactgggacattctacttcttgtgtcaaccacaggactccaagtcattttagtcagtgattttagtcatttatttatgtattcattgaccatttctcctcctggctcctgaagccctggagggtagctgttcctttccaactccagaacttggcttggtacctgctggtgagtctgtgcctatcaaatgcggaatgaacgaagtgtttagaagtgaggatctcctgagcagcttcttcctgtgactgagatggtggatgaagggctcttctgggacctctgcttttatttccatgcttgctaaagcagccagcacatggctgtactcaagagaacttccccatctacattcccattttagggctgtgctgtttacaacagcctcagatccaggttgcaaggaggggaggggaagaaagcacccagctcacagcaggtgtttatgaatccttcctgccagcttcagagaatctaattggtctggttatgttgtgtttaaaaaattaacacattgaattgctaaacccatgttgcattagtgcacaaactatagctcttctctgaaagctcctcacacagacaagggcagacttaccttgttttaaaattagcatattaaaattgcttttctgaggacctctagcatcccctccctctacagataacaagtattgatgacatactatcattgtttttttgactgggggatatgtgagttaacaaagaaaagttctatcgcccaagcttgtaaattagatgattttgtcctggggtgtgcaaatcgactttctccatcaggcagcgctttgatcaggggctgcaaggagccagcctgtgtgagaatggccacctacacaggagcctttctcttcttccccagtttctgcagctaagtggttgccgtggcaaggcccatcttttcagctgggggagatgctagcctttgcaagttagctttctgctacccccaccccagcccaaagaaaggagctaagcaagagggagattaggaagaaggaggtagaacaactggagaggtggggggttgggtggggggagcgagatgacaggaaaaggacagaaagctgggcagcaggggttctctctgtttgctgcttttggcaggcgtactcggtgcctttttatattctgcacttgatttggagatgttcccttttcccttgatagatcagcttcaggcagccaagctcagcagtgttctgctactagcctgcagcagctttcttcattttctgtacaaagagagagggaggagggaaggagaaaaacgagggagatcgaggacagtgttgagacaccaccacctcaaaggtgcgcagtgtgcggccaggaaataaattaccacttcttctctgatccaggccgtttgactcccttttcccccactttctttcctcccacctcctttccaatcttatttttttaaattttcaactctctttctgtttagattctactttctattccttgagttggtctctcccctccccacctcagagggctgccttttttttttttttttttttttttttttttttttttttgatggttgacaacagtctttgaagattttctacttcaaagtaactactgatgggctggttgtactacagaaagaacaagcagggcctctcggagtgcgaccaactgctcctgcccaaggcaaacgctggtggggaccatggctctccatgaggccatggcgctagcgcataaaagtcccgagcagcccaggccgccttgccatccactctacacccgaacatgggtttgcggtgcacagcgcctggtgcgggaagctccggccaagccaccgcccacctagcctgctgaacgtgcctcctccctttcctttccacgtcctgtagagaacccaccgcctgcccaaggagatgacccccgtggaacccgccacctttgcagctgagctgatctcgaggctggaaaagctgaagctggagttggagagccgccacagcctggaggagcgcctgcagcagatccgagaggtaatgcggcctaggccttcttcctgcttccgtccacggcgtgagcgctcgtatgtgtatgcgcatgtgcatggggtgcgttagggtgtgcgcatgtgcgtgggttgcatgcgcatgcgcgtgggctgcgtgtgggtgtgtgcctgggcgtgggctgtgtgcgcatgtgcatgggttgcgtgtgggtgtgcatatgcgtgtggatatgtgcttgtgtaggcgggcctgtgcgtgtgcgcatgggcgtggctgtgggcgtgcacacgggtgtgcgtgctcctgcgtagggagccgaatgttgcaaccccagggcctctggcccttctgcttcctgggtcacttctccttctgacgtcttccctttcaggatgaagagagagagggctccgagctcacactcaattcgcgggagggggcgcccacgcagcaccccctctccctactgccctccggcagctacgaggaagacccgcagacgatactggacgatcacctgtccagggtcctcaagacccctggctgccagtctccaggcgtaggccgctatagcccccgctcccgctccccggaccaccaccaccaccaccattcgcagtaccactccctgctcccgcccggtggcaagctgcctcccgcggccgcctcgccgggcgcctgccccctcctcgggggcaaaggctttgtgaccaagcagacgacgaagcatgtccaccaccactacatccaccaccatgccgtccccaagaccaaggaggagatcgaggcggaggccacgcagcgggtgcactgcttctgccctgggggcagcgagtattactgctactcgaaatgcaaaagccactccaaggctccggaaaccatgcccagcgagcagtttgggtaagtgccgggcggaccgcagtgtcccgtgtggggcttgtctcccagccaggtccatgggcaggtgtgaggtgggagccgcattacaggcatttagtttctaagagggcggcagagtgcacggccgggtgagggtgcggggagcaggtgcatgggtctttcgtgtcaccagccccccgacttgctgaattgtctgattctaggagtcccggagatttaaccgggtctctgggttgggtgtggttcttggttccccacagcggcagcagaggcagtaccttgcccaaacgcaatgggaaaggcacggagccgggcctggccctgcccgccagggaaggaggggcccccggcggagctggggccctgcagcttccccgggaggaaggagacaggtcgcaggatgtctggcagtggatgctggagagtgagcggcagagcaagcccaagccccataggtaaacaccgcttgccgccgccgcggccgcgagggtcatgggcactcagtacggaggtattgtgggaatggctgtttttgcagtccgcggaatacaaatgtgactatttgctcctgccatcttaatattaaacgttggactgagcagaccacaaaaatgtcatgttttggcactgacccctgttcatgttatggtagttttttttttaactctctctctgagcagaatagacaagtttctattgaagtcacattttccagttcttctaacccagtttctttccttctgttttctctctgctcattccttgtttagtgcccaaagcacaaaaaaggcctaccccttggagtctgcccgctcgtctccaggcgaacgagccagccggcaccatctgtgggggggcaacagcgggcacccccgcaccaccccccgtgcccacctgttcacccaggaccctgcgatgcctcccctgaccccacccaacacgctggctcagctggaggaggcctgtcgcaggctagctgaggtgtcgaagcccccaaagcagcggtgagtggaagtgaagggtcctaggttgaggcagggattgggtttgggtggagacctggtctgtggctaatggggagggcctctctttctgcctgggtctcaaaccctcccatgagaagaagaattacttatggatgagtaagctgctgctttccagcttctagaaattgttcccttcagttatgttcattctactagagttaagccaggatctgtgaggcaagtcatgcctagaattgggagaatgaatttcagcaattgcttacaaatcccattccttacaaatgtcttgattgtttaaggctggttagttgagtatataagaagctgtgagatggaggatcaagagtcctcagccctttgctggggctgagaatgtcccatcctgggctcccaggggggcttagaatggctgttccaagacgtcttcctggcctcttcagccactgttaacccagggtcttggttgggtctccgtaaggatggaagtcgggttcgtgtctcttcaggaggccaaatagtaattttctgtctgcttttcaattgctctggggacaacagtgtacctctaaatccctcgccctggctgtgtcctcaggtgctgtgtggccagtcagcagagggacaggaatcattcggccactgttcagacgggagccacacccttctccaatccaagcctggctccagaagagtgagtgtctttacctgacattactgagatctgccgagtgctttatgtttcagaatattcgctatctggagtttcattttcatgaaactttttttggtttttaaaatcactttgattttagcgctagtgatgaggaacagtaaacgtagatgttgccatccatgtcctgccgacaaatgcatcatagcaaaagtttttctggtcatacacaaatcaaaagctgggacatgaagccattagcagaagtgtagaagggacctcaaattcagctggaaaagttgcccccattcaacttgcaatttagtagtactggaaacatttgtcacccctgagcagaaagatcattctccactgtggcagaggtggaggggaccatccttgtgtttttgtttggagaagacagaatatcttcccccaaattgggcagtgattctttttgtaaatttagtctctttcaaagtaggttgaggagcctgctcgtttaattactggatggtgcaattaaaaagaaatctgctaaagagatctaaaatggtctgtatcaagttttctttcttagtgtcttcatcctgagcaatgagcaatgtttgaagtcctcaataggccactgccctggaccctttcattgtttcaattggttgaccctaagtgtaccagctctctgggtctgggccagccacttttttttttctttttgagacagagtctcgccctgttgcccaggctggagtgcagtggcttaatcttggcccactgcagcctccgcctcctgggttcaggcagttctcctgcctcagcctcccgagtagctgggattgcaggcgcccaccaccacacccagctccttttttgtattgttagtagagacagggtttcgccatgttggccaagctggtctcaaactcctgacctcaagtgatccgcccacctcggcctcccaaagtgctgggattacaggcgtgagccaccacgcccggcctagcagcctttttttcaagccattctacaaaatctcagaagaaatggggaaatggacatgactgtgtgataacccccattagttgttctcattctgctggaataaggggtgggctttaggcattctgagatcatgccatcccaaaggtgtcctgctctgggtttgtctctttagcactctccaatccaggtgagacccggcatctctgtgataatttctcttctctcatcttcttgaggaagcaccccatttatgccagcctgaaagaggccgccgtatactttcatttggtggcggtgggggaaatgataccaatttgtacaaccaaaaggaaatcatccttttctgcatgctgcatgcagcacatgtggggttggactgtgtgtcccccagagctgcctgactctgggatgtggggctctgccccagcccccactttgggtttacaattgcagccctagtgtttggataccctgtcacttatgcacatgtgcgcacgtgtgtgtttgctttagatgtgtgtctgctttaaaatgctaaacttgttccattccatcttattttcagtcacaaagagccaaagaaactggcaggtgtccacgcgctccaggccagtgagttggttgtcacttactttttctgtggggaagaaattccataccggaggatgctgaaggctcagagcttgaccctgggccactttaaagagcagctcagcaaaaagggaaattataggtaagagtcctgtggcttttttctgctctcagtttgtttgctcagaaccaagagccagagcctggagcagctcccctggctgagcagacctaggtggggcagggtgggagggggctcagcaggcgctgggggaggctcccttctcatttcttctctcccctcaccgctagcagcaataacgaagcagcagccgcaagagggaggctgcgtggagggttctctgggggacctggccaggctctttccaccaggtgaaccagactgaggagagaaaaggagcagctgcttgcaccgacaggagagtggggctcaggccacactgcagaggctttacctgcaattgaggggcttgtgggcgagtggggagcagggagcaaaaagagggacaggcacactgattaggagggagggtctggaagcgccgccctactggcttgagtttaggagagacccccacattgaaggctccaaatagtcaggaaccatgcctaggaaaagtcccccgtgtttttcttaccctgcctttccacctgaacagcctccctggattttatgggccattagaagcagagatgcgcctttgtccataacaaagaaggggctggacctgcgggtgggcacagggtgaatagggcagtctactcctcctgtccaggcctgggccccgctgccttctcccctgcaggggcttcaggaagggaacttcctggtctccttaccttgtctgcagagtggacggaggtgcccttgagaaggtccatgctgactttttagggcccttgagagggttcaagagctgaggaggatgagggccagccctaggccattccttctcttgatcatttccctcgtaaggagcaggtgatgactctgcctcagttcatctggagtcctcccttgcccctctccatggcctgcagcccaagagaatgtgtggattctgctccagttctgtcccaggtttcccaggtttagggctccaggctgggacaagggtgagacaggggcaccctagtttaaggaggtgctcactctggggtctacacccaagacagagttccaactcctcagctgtgtgctgttgtccctgtgccaggaccacagtctattcccaggtgtgaacccgttgccgccaccagggccaggggtgtgagtggaaaactctgaatagcacttggtaacctgccaggtgggcatgggctcctggacggggatgagtccacctgcagggctctgagacaccctcccctctagagcaggccttgtatagttttaccagccaccttcatctgggagttagtttgggcgggggctcaaagtgattctctttggagtggggaggggatggaggttggactgagcccctggaggtaactggccagcagggcgtgttgctgggtctggatagtcccttttatacctgggcagagacaattgtgaaaaggtatcaaaggggtgggggaacaggcctggctgctgctgctgctgcttttatcttgaaaagacacaaggtgaaactaatgacacaagtgtgtccctctggggattcattttgatcttggctttgtctcggctggacttcgagtggaactgcaggtgaccttggagaagagccatgtggcgctggcataggcttgtggggaaagtgcctccttcagctgctgtggccacatctggctctgattttttttttttctccctgaggcacagttaataagcctggctttgaagccctggcctcccctttaatgcacaaagacttgcacaaatggtcaactctccgatcctctccagttctttcctgagtggatcaggctgtgggaaggccctcccagctgccttatctctgcagggcctgagctagactcagtgtcctcctggggtaggacagggacacagggtgtcacgcctcaccctcccagcagggctggtgcttcaacatctcaatttgtacaaatacatccccccttcaaaaaaataaaaaagacccagtgaggttggggccgtggagcaggggtgggaggtgggggggacctgggatgcgttgagtaatctcaacatggcaggggttcaaaaagcaaacagtcccttcagacgcgccagacgctgttggtgccagatgtcagaagaaagcaaagtttgccacatgaagcatgttgcagtggaaaagcctgtttcttggagaaaatgagggcagtgcagtgtgtttgaagtcctgggggtggggctgagagaatgtggcctctctcctctctggaggaggttgcaattatgtaaaaggtcgctgcgtgtttgctcagacatgctgtgaaagcccaacttggtaaaccctggaggggtcggagctggggccaaaggggtctgacggagggtggcgttgggatttgagcctcttatgtggagaagtgacttttccccccactgtcctgagtctcctgtgcacagagcccctccccattttctcactgtctcctctcacgctcccccgagaattttgaccccttgacatgacgtgtcttcagtgctgcctagtcagagccatgccgttgttcaccccactgcattagctgggtcaggaatgctaaaaacaaagaaccttgactaaacccagctgttcactgtatttagccttatctcctacgaaagtatttggcttgcctttattaaagagggaaaaaattgagctctaaccaaggggagttaatttttttttttttaaagggaaaagacaaagcccaaccataaccctgagacacaattaaatgcttgaaaggttctcccatccccccaggggactgtgaccttccctctgtgagtggcctttatgggctggaaatgacagcttgcaggggcaagtttaatccctctgaggggtctcccttggctggggacagggaaggaagaggcccttgcttaatttcctcggaaggggtttaggggtgggcctggcccaagaggacagcagttgtttccgaatgtggcactcctgagaggccaggcatttgcatctgtacaattaaacagcctcagaagaaagaacgctggggagggatgaaaggagcctttaatcaacgggcataatagaagggcctttggtgtttgaccctggagggatgggatgggagaagaggcctggaaatggggagaagaggggagggcatcatggggccagtgccgtctgttcggccctgggaagctgcgctgggctggcttgcctcctgtgtggctgtgccagggccatccaggagtgttgcacttgggacctggaggatgggaaggccgagaggcctttggactgctaaaccatctggaagtcagccttttacagacttcggcaggttccggctctccaggtgtgatgggttcaggatggctgaacctggagatagtctggagtctctttgaaggacctgcttggctcctgctgcaaaggaactgcaggcatttgtccttcccttccctcccccaccccactgctgaaaaaggttggcggggggaaagcagctctgcttttcacagtgtatacgtgtcaggagacagcagaggtgctgggttgaagattgcaggtggcaggcccagcccaggctgctgctcagtgggtgcctggccttcatcatctcggcccacctgcttcttgtggtgtggccagtcccagctgccgtcttaaagcagatgtgcgcaacagtgtacaggcacacctgccatagcaaattcctaggatacctcagtcctccatgttggtatgcttttcttttcaacaatgtggaaaatgcagtttaccaagaagcttttttggttttccttttaaggtattacttcaaaaaagcaagcgatgagtttgcctgtggagcggtgtttgaggagatctgggaggatgagacggtgctcccgatgtatgaaggccggattctgggcaaagtggagcggatcgattgagccctggggtctggctttggtgaactgttggagcccgaagctcttgtgaactgtcttggctgtgagcaactgcgacaaaacattttgaaggaaaattaaaccaatgaagaagacaaagtctaaggaagaatcggccagtgggccttcgggagggcggggggaggttgattttcatgattcatgagctgggtactgactgagataagaaaagcctgaactatttattaaaaacatgaccactcttggctattgaagatgctgcctgtatttgagagactgccatacataatatatgacttcctagggatctgaaatccataaactaagagaaactgtgtatagcttacctgaacaggaatccttactgatatttatagaacagttgatttcccccatccccagtttatggatatgctgctttaaacttggaagggggagacaggaagttttaattgttctgactaaacttaggagttgagctaggagtgcgttcatggtttcttcactaacagaggaattatgctttgcactacgtccctccaagtgaagacagactgttttagacagactttttaaaatggtgccctaccattgacacatgcagaaattggtgcgttttgtttttttttttcctatgctgctctgttttgtcttaaaggtcttgagggttgaccatgttgcgtcatcatcaacattttgggggttgtgttggatgggatgatctgttgcagagggagaggcagggaaccctgctccttcgggccccaggttgatcctgtgactgaggctccccctcatgtagcctccccaggcccagggccctgaggcctgctagaatcactgccgctgtgctttcgtggaaatgacagttccttgttttttttgtttctgtttttgttttacattagtcattggaccacagccattcaggaactaccccctgccccacaaagaaatgaacagttgtagggagacccagcagcacctttcctccacacaccttcattttgatgttcgggtttttgtgttaagttaatctgtacattctgtttgccattgttacttgtactatacatctgtatatagtgtacggcaaaagagtattaatccactatctctagtgcttgactttaaatcagtacagtacctgtacctgcacggtcacccgctccgtgtgtcgccctatattgagggctcaagctttcccttgttttttgaaaggggtttatgtataaatatattttatgcctttttattacaagtcttgtactcaatgacttttgtcatgacattttgttctacttatactgtaaattatgcattataaagagttcatttaaggaaaattacttggtacaataattattgtaattaagagatgtagcctttattaaaattttatatttttcaaaa

SEQ ID NO: 267 - DNA, 110011 bp, Homo sapiens
ggccgggacgctcggcggagccagggagtccggcgagtcgctgggggaagtcgagcagacacccagcgctgccggaactcggggcgcgcatcccgcaagtcggaacccggcggatcggatcccgcagatcggagacggggcctggaggtgagcgcgaggcgccgggtggcttgggacgggcccttccgaggggagccgagaggaggtccttctgccctgcccccaggagcaaaacctgggcatcttctcctggaaacggagccctcatcttcccaagacgcggggccctcccccgaaaagacaggggctcccaccccccagagagcaaaataccttcctttctccttcagaaatgggcccttcctcctggctccagctctagacagaagtcctctcccttttaccgcttgaaatagaatgcggccccaaaaagtggtctccaggtctctagagccccctcacctcttgggagactgatgccccttccccatccttagaaaactaagtttgggtgtcttccttctcccctctctttcggaataatgggggtcttctcagcttataaattacagtgacctccccctccatgacaaatggaagctctccccccatcataagacaaggaaatcccggagcagagactctgcaagtcaccctcccaccccagatactgggctctggagagatagatgattcacccttagccctgccggagacccctccctacccgtcagagaggcagggtggcctctgacaccaccacattaaaggcttttggggatttcccctctcctccccagtaaagatgtaaaatgagggaccttcatactcaggagcagggcaaaggtctggccacccctccaagtcatccacctccctccactccacccaagccctttcacacaaaccccatcctagtaaccccctgcaccatcctcccaccgctcccaatcccatccttctccacctcaccccaactccactcccacacctggctgccccacctatttcacatcctctcacctttcctcacccaccctggccaaggtaagactagagggggttcagcgagatttagtaagactggagctcttaaaactgggatctggggcctagaggcccttccaggagtcttcaaactctgacaacagagatggcctctgaggcagcaggaccagcagagaccacccgccacctctcccccgctccctgccccaacacacgcacaaaggctgtgttcaatgcattctctcttgcagtctgggaggacagctggccctcttccaagagggcccgcatttcccccctaaagtgtgcacccccgcaagcgcctgtggacattgcctggtggaattccctgggcactcagccaagagaaatgggtgctgctgggcccatccactggggaggagacagtgttggctttgctgctttgatgaagctagactaagggacaggatgttggtgacctgggggtggggagggggtgggaagagctcttctctggtgggtcaggttgggaggcaggagagagggaggcagtgagttgtgtcttgctctttggagcctgtgttgcggcgtggagtcatagagaaatgtgttttctcgaggcccaaagaggttagccacggggagaggtaaatggtccagtctggagtcctaagacctaaaagggcttctgcattaaagacgtggccccttcatttgacagttaaacacacagaggcacaaaaggggaagagacttgctcaaggtcacccagcctgtgggagacagctggccccaacccctccaggacccttaaggtgctaggatccctgacacaagccccagtcctcacatttacaatggggacttggggactgctgggtcccaagtccccacttgtcagaggaagcgccaaggctctgcaaaggtcatgaagccaggaaggggcagagctggaactcaatgccatcccccagcaggctgcctcgtggaatccattcctgggtgtcagcgcatccctgcttaccccgtgcgatctttgtgttgaggccattgccaaatctaggcttgccaaaatccaaactgacccaggatagctaataagatcagttgcagctaatgagaatgagatgctggagtggaggctactgcaggaacctcacttgcatagctgggtttgctccaagaactttggacaggtcctgaggatgtcatattccttccctccaaggtcccctccctcttagcccctgcccacgccctctggctttgagttccctgcacattgtctcatctctgttcagaggcctgcgtcttttctcctggggcattgcatgggaaaagagctgaaattctggcagattctctaggaccacccagctgggcagcatggtctgaagtagaggctctctctgtttctgcccccacccagttcccagctaaaggattggttgttgtgccccaactttgccaaggcgaagttcaaagcatgaggaggaccacggtagagaggccgagaggttggtccctggagacctcttatctgggtcgagagcacaaatctgccacttagtgtctgatcttaacctctctgtgacatatccttggggtaaaatgagttaatcctcataaaatgtttagcacacagcaaaatgagcagaaacaatgattacaagtgcaaagtcataaaacctctaatcatgaagtggggaggtgcttatgccttaaggcaaaacttgtaacccttgccgtagataatctgccagggccaaggtgcctggggacaaggggatgtcttcctagagagacagtgtagtatgtggaatggaccacagaccctgaagccagatggagtagagagttggccactggtagtggctgtctatggaaacttaggcaagtcattcatgtctctgaacctcagttcctcgtctttgaatgaggtttgttggggttggacatcagaaaagagacaggtctagatgaggggttctcattttgggcactgttgacagttgggtcagaggattctttgttgtgggactcccctgtgtattgtaggatattcagcagcgcctctggtctctacccactagatgccagtgacactccctaccccatgagtcatgtccatcagaaatgtctgcagacattgccagatgtgccctggggagcaaaatcatccttttccttcgctattgagaactgctggtctaatacatggccttaaacatagttgatacttaatataaaacagcttcctagctgaggcgggtggatggcttgagcccaggagtttgagaccagcgtgggcaacatggcaaaaccccatctctgtaaaatacaggaaaaaaaaaatcagctggtcatggtggcatgcgcctgtagtcctagcaacctgggaggctgaggtggggggattgcttgagcccggggaggtcgaagctgcagtgagccatgatcacaccactgcattccagcctgggtgacagagtgagacactgtctccaaaaaaaaacaaaataaaaaccaaaaacagcttctttcttgcacaagctcctcgttttggtttctgtgtaatgaggagaaggagatgtgtctagctgtggagccttccaatattaataacaatttttaatttctcacatttacacaagactttcttgtctggtttttgtttttctctttagtagagacagagtcgggtggtctctaactcctaggcttaagcgatcctcccgccttggcttcccaaagcactggggttacaagtgtgagttacaaccaaagcgctggggttacaagtgtgagttacaggaataagccacagcacccaacctacacaggaccttatcatctccaaagcactgttgtgtctatgacactgtttctcactctacagataagcaaactaagcctcacaaaggttaaaagacttgtctaagaccatcacccgcttctccaccaggcatcagagaaacatccatgccagaaattgtttgagaaacaactgagttctgggccttcttcagattagttatcagggtctttcgaaacttcaatggcatgctctttggtccagcaatcccactttgaaaaatctcacacagaaatgctcacacttgcactgacataacataaaaatgtccatggcagagcttgcaacactggtatgggaagggattacagtatatgcattcatgtgggagaatgagtagattttagatgaatgaggtggatccacattcctgaccttgaaaggttcctgagtcatattatttagtgaaaaagataaagtcacagaatcaacatagccagtatgatcctatttttttttaaatgtaaatatgcatgaacatggatagttagggaagtggggaattaaaaggacctagatagtatgtatgtatgagaacatattcctgggggaagaagaagaaaataaatctccgccagcttcccatgcattaaaaatgagcaaagtgggctggccaccttgtctcacgtctgcgatcccagcactttgggaggctgaggcggcagaatcacttgagcccaggagtttgaggctgcagtgagttgtgagtgagccactgcactccaacctgggcaacaaagggacactgtaaataattaatcataagataaaaattaaaatgaatagagcacaacccacagaggttgagagacttgctaacaccagaagttgccagtggtgaaattcagctttgagtttgctgatagttacggggccaagagacaggaatctgaggctcatctcagcaggccaagcctccttccttactgtggggaaattccttctctgagcacctagagggatcctggtgtcagactgacctcacctgaatcaggcttccacccacgtgatgacctcaggccagccactttaactctcagtgcctcatttctctaactttaaaatagctaaaaggcaaaggaaaaaacatgaaagccaaaaaaaaaaaaaaaggtagaaggaggaggcaatagtagaacctctctcattgggccgctgtgaggattacataaaaccatgtgttccgacccccagtacttagtaggtgcttaattaacacgagccctggtctctcctgcctttttctctgcttgcctgctccttgccaggatgcagaagacaaaagcctcagaaaggacagtgggggctcctgaggccccaagaatgcttagcaggctgaatcagttgtcctcacttcttcactttgccctctgatccaccatgaccactctgctgcaggagcttttaacagaaagcctgggagagcattctgagggggtctgtgctatagctcttcctccctggggtctaaccatccttgctttctctagacactccacacattaaactgtcttgcccgttgcagggatgggatggcatcatgtggcctctaattacacatcccttcaataataagattgactctccaagggcaagttttcctcctccttcaaaagctatctcacattgcgtcttttacaggtagtcttccccgaccctcccccacctccagccaggaaaaccatttctcctcctcccaactcctgtcatccacatcctagacttcctgggtctgccacatcctattcttcctgggtccatcacatcctagatttcttgggtccatcactgtttgctggatttcttcccaatccataattgcctggaagcagccatcacatccatcacatttattcttgtgtcttaaatgcatagcacacttccctatgcacacagtagatattcaaggagcattgactgaatgcagaaaagtattttttaaattggggtaaaatacacataacatgaaattgaccattttcatcattttatttttatgtatttttttggggggcagggggaatcttgctctgtcacccaggctggagtgcagtggtgtgatctcggcttactgcaacctctgcctcctgggttcaggcaattctgactcagcctcccaagtagctgggattacatgtgtgggccacaaccacgcccggctaatttttttgtatttttagtagagacggggtttcaccatgttggccaggctggtcttgaactactgacctcaagtgatccgcctgcctcggcttcccaaagtgctgggattactggcatgagccactgcgcccgacctccattttttgattattatcattggggtcactgtggcaggtgtgaagcaataccacattgtggttttgatttgcatttccctaatgactgatggcattgagcatcttatgtgtttgttgcttatttgtatattatcttcagagaaatgtctactcaagttctttgcccatttttgaattgagttgtctttttgtctttttgttcttgagctgtaagagttcttcttttctctttttctttttctttttatttatctatttttttttttgagacagagtctcaccctgtctgtcacccaagctggagtgcagtggcatgatcatagcttactgcagccttgacttcccaagctcaaacaatccttctgcctcagtcttccaagtaactggcacaacaggtgccaccacacctggctaattttttaaaaagcatttttttgttgttgttgagatggagtctccctatgtagcccaggctggttttgaactcctaggatcaagcgattctcccacctcggcctcccaaagtgctgggattacaagtgtgaactgcctcgcctggcccagagttctttatataaataaatgtttctttgtgtcactatttcttcatccacttaaatatttgctcagctcctgtaggtcacacactatcttgtgatcctgggaataccaccagttcctgcctatcaggaactcacagtctactgcaaagtttctcagcctctacacttttttttttttttttgagagggagtcttgctctgttgcccaggctggagtgcagtggcatgatcatgtttacctggaacctatgaataggacctaatttggaaatagagactttgcagaaatagttaggttgaaatgaggtctttctgcattagagtggcccctaatccaatgactgctatcttttttttttttttttttgagatggagtcttgctctgttgcccaggctggggtgcagtggtgcaatctcagctcactgcaacttctgcctcccgggttcaagcgattctcctgcctcagcatcctgagtagctgggattacaggcacccgccaccacactcagctaatttttgtatttttagtggagacagggtttcaccatgttggccaggctggtcttgaacttgtgacctcaggtgatccacccgcctcggcctcccaaagtgctgggattacaggctgagccacctctcctggcccacctctatactactgacgtggaagcgaggctgtcctgtgccggatgtttagcagcattcttggcctccacccaccagacgctggcaacataccttcctccacgttgtgacagccagaaatgtctccaggcattatgaagtgtcccctggggaacaagattgcccctggttgagaatcaccggttagaggctaagacagccgtgtatatctataatttcaatcagattgcttgtgcctaacaggatacacacacacacacacacacacacacacacacacacacacagaggaggcattcaggatgtatttgttggatgttggatggctgggggtgtagatggatgcatggatggacagacacaacccctttgttggttggctagattgatggatacatgtgtgaatgaatggatgaataaatgaatccaatttacaaattccactgtgggaaaacagaacgctattcttccaaccagagtagcctgcccctttatctctgtctagcacagtgtttttcaaactttagcatcagaatcccctcaagagcttgttaaaacacagattgatgcccctgcccaccagaattatgatttagtagaatcaccggcggccagaatgctcccaactctatttccatgttctctaggaatcctggaccagcccccgacccctgccaaccttgtccttgtccagaggtcccgtaatcttcactgccagcatctcccatttaggtgctaacatctattatcttggatatcagcaacttgccagcactctgtccctgggctgcactgagaattccttcaaaggtgggacccactgtattctagtaccttactactgaaagtgtggtccagcggccagcagcattgcatcttctaggagctagctagaaatgcagaatcttgggccccacccagaactacagaatgtgaatctgcgttttaacaatatcccctggggtgatttgtgtgcacttttaagtttgagaagcgtattttagacagatctgtaaaccccacactcagagctaagctagggatagctttgctgataagttacattgacagcatctgttaccatgtaattggtgcctgagctgaagcatctttcaggcattactggccatttgtacctttgcctgacgttatctcttgaaatgtctacactggcctcgctttacccgtgggaaaccagaagcccagaggagcagtgccttgcccaaggtcacacgatgaccatgaaagcagagtggagatcactctccactccttaaagggaatgggatcaagaggattgaaatgctgtatccactgagcagggcggcacatgcctgtagtcccagctactcgggaggctgaggcaagaggattgcttgaacccaggagttctgggccgtactgtactataccagtcaggtgtctgcattagttcggcatcaatatggtgacctcctgggagtggaggaccaccagcttgcctaagaaggggtgaaccagcccaggtcagaaacagagcaggtcaaaactcctgtgctgatcggtagtggaattatgcctgtaaatagctactgcactccagcctgggcaacatagtggaaccctgtttctaaaaaaaaaaaagagagagagagagagagaaaagaactgaaatgctgctatgatactgaaaatatggggtgtagggggagcattctgaagctacttaggtctgtcctctgaaactggagaaaggggagatgacttgaaagtgatgcaagaacaagaacttaagttgtattcttttgttcatccaaccagtgtttattgagtacttactagactccaggcatggttgtctggtatctatagtattgaacaagaaaagccaggcctcccttttgatggcttatctggagtggacagacgtagccatctggcattcattcgtcaatgagtgtgttcatttattgcatgatttccatgtgctgtgtacagtagtaggggtgtgtgcgtgtctatgtgtctgtgtgtgtgagagagacagagagagagagagagatggagggagagacaaagactcagctactacaccagcgcctcttctagactagccatgcggaaacaggccccaaaacaaggaccacacagtgaggagagtgccgaaggtgtgtgggagtgaatacaggttcaagctcaaagtaaaaagaggttaccactccctgttcctggggattctagggaagaaatttcaggaggaaaaggcagaaaagaagagaaagagactctgtgcagggagagcatcatgaacaggcccagagagttcataggaagccgttccaagaaaatcgcaggggaaaaaggaaggatagacagcgtatggtggctcgcacctgcaatcccagcgctttgagaggccgaggtgggtggatcacttgaacccaggagttcaagaccagcctggccaacatggccaaaccccgcctctacaaaaaatactaaaattagccgggcatggtgatgcatgcttgtagtcccaactactcaggaagctgaggcaggaagattacttgagcccaggagtttgagaccagcctgggcaacatagcaagacccctcaagaccccttctctacaaaaaattttaaaaattagccaggtgtggtaatgtgcacctgtagtcccagctactcaggaggctgaggcaggagggtcgcttgagtcaaggaggccgagccaggctgcactgagccataatcatgccactgcactccagcgtggacaacagagtgagatcctgtctcaaaaaaaaaaaaaaaaaggtggagggtaaaatcatgaatctcatacagatacaaaaacactcaatgattttattaggctcattcaatgagggaaccaggcagacattagaaccagttcaaaggaaaagtcaaataaagcacaaatatgtaaagagtaaagggaggtctaaatagattcaaaacagaggcaaacatggttggacaaggcagaatttgcttgtctatcagttttctacaacttacaaaggagtcagcaaagtagtttgaaaataatgaacaaggccaggcatggtggttcatgcctgcaatcctagcactttgggaggccgaggtggacagattgcttgagctcaggagttcgagaccaccttgggcaacatggtgaaaccctgtctctaccaaaaatacaaaaaattggtcaagcatggtggtgcgtgcctatagtgccaactactcgggaggctgaggcacaagaatcacttgagcctgggaaggggaggttgcagtgagccaggatcacgccattgcactccagcttgagcaatggagaccctgtctcaaaataacaataataatgaacaagtgaacaaggctagaatcagataatccaaaaatttgtgttgtaagtaggtagtgcataactctttttctataaaaacaatgttacgccgggtgtggtggctctcgcctgtaatccagcactttgggaggccgaggcaggcagattgcctgagctcaggagttcgcgaccaacttgggcaacacagcgaaaccctgtctctgctaaaaatacaaaaaaaaaaattagcctggcgtggcagcctgcgcctgtagtcccaactacttgggaggctgaggcaggagaatcgcttgaacccgggaggcggaggttgcagtgagccaagattacgccactgcactccagcctgggcaacagagcaaaaccctgtctcaaaacaaaaacaaaaaaacaaacaacagcaacatcgaaaaaacaaaaaaacaaaaaaccaatgttcaagtgatggagaggcatgggtggatgaggagtggcaagaggaggctgtaggaagagtagatcatgtcccgccaggtgacccatgatcttgaatttggacttgactcagagacccatagggaaccatggaagagattaaagcaaggcagtgatgtgattttgttatcacttgagaaagatcctcctggaagctgaatggagagtagacagacaccttctcccactagcctttgagctcagatttccttagggaaacagccaatcccaggggcagattgctgaccttcctgcaaaaggttttagaacgtggaagctccttcagggcaaggttggctgaacaccagccaaaagagcaaggcaccaccccggcaggacagggctgttttgtgcacgggaacaaagcctgcctcctctctctgcccagagctgtaaatagcactctgctggcttcgcaggctgagcgccggtctggggacaggctgaaaatgcacacaccaaggagcatttgtgcaaatgaatgcctgcatgcaaatttgcatgcctggcatcctgccccagccctaagtgtccagtcctgcaaggggctggaagcagggctcaaaaaagagccacacacagaagagtgtggacattctgacctggggacaggttccaggagggattcagaggcaggctggcagggtgagtgggagaaaacatgcagagaaccctggacagagttttggctccagctttacccatgataatgacaatgacccatgagtagtagccactcacattggctgtgtatttgtgtgtagttgctcaccttgtcgctcacaacagccctatgaggaaaggctgatcagatttcagagacaggaaatggaaactcagaaaggatgactgactcgcccagggtctcctactgaagggagcatttctagtgagaaaccgaggcttgaagactctggagccctggtgtctaggactgacccacatggacgcctctgcatatgcccactgctggctctgacctcagtttactcctccatcaaagggtgcaataatgtctttgcacctaatgatcacagcagagtttgggaaatgaactacccctgcaaatgagaaagacttgaaaagtcatcaatgctgaatatgaactgatggtatgtggagaaagtctgaaagtgctttccttagccccagagacagggtgtggagtgcaaggccaaccttgtttgtactcaggggctttggaagtgcagagtggccttggatgggtggaggtgaaggcatgctgaagcttgctgaaccactcccggatcataggtgagccaggttgggtctagtctgttttttttcccttgagaggaagagatggtgggtgcattgtggagagagagggaaacagtgaccctgaggtggggacgcacatctggacggaaagtgtttgccgagagcacttggccgcctgccctcccacggagcaggtgctagtcttgggtcccgctcttccgggttcttcagaagctgagctccggtctgtaatcccagcactttgggaggctgaggcgggcgaatcacgaggtcaggagatggagaccatcctggtcaacacggtgaaaccccgtctctactacaaatacaaaaaaaattagctgggtgttgtggcgcatgcctgtaatcccagccacacgggaggctgaggcaggagaatagcttgaaccagggagtcggaggttgcaatgagccgagatcgcgccaccgcactccagcctggcgacagagtgagactccatctcaaaaaacaaaaaacaaaacaaaaacagaagctgagcagcttgctgtttgtttggactgagcagtccttccagcagcagccacctgtcaacaaatcagatcatttgcgggtcatccatcaggtcccacgcggtgcatcccctgaaaggcctgtggtggggcttgggctgaggcctgtgtcttagacctgtgagatcaggggaaagtcctgagtctggaaagcagctgtgctgctggctccctgagtgcccgggagccagtgatttctgtccaggcctcagtttcctcacctgtaaaatggcaacaacaaaactaccttttgaaacattatatgaatggttgttaaattggaaaactggatgataagagttgaatgctcttttttttttttaagagacaggggtctcactctgttgctcaagctggagtgcactggcaccatcgtagcttactgcagcctcggcctctaggctcaagggatcctcctgcctcagcctccccagtagctggaactataggcccgttccctgccccgctattttacttattttttattttttttgtagaggcaaggtcttgctatgttgccaaggctggtctcaaactcctggcctcaagcaatcctcccaaagtgctgggattataggcatgagccaccgcacccggccaaaagttgaatgcttcctacctacaagacactgggtaacactgggtactacttggactatctcatttttaacctcttagtaaggtgggaaaggtcttcttcttttaagcttcttcaccaaggtcacagaggtagcaagaagttgaaacaggacttgaactaggatctgcctggctccaaaacctaagtctccaaacatggggttattggaggacctcccagggccagggacttagaagccctcctccttcccttcctgtacctttattcctcaagtctgtatagacttactctgtttttttaacaatttactttttgaataggcaatcatggcacgtggtaaaacactcaaacactgcaactcaatctacagaaaaaaaagtaaatttttctccctcatccccatcctgtggacccctttgcctcattagaggcaaatagtcaccaaggccagggtcttactatgttgcccaggctagtctcaaactcttggcctcaagtgatcctcccatctcagcctcctgaagtgccgggattacaggcatgagccaccaagcctggtcttcctttatggttaatgctttttgtgtcctacttaagaagtccagctgggcatggtatctcacacctgtaatcccaacactttgggaggccaaggcaggtggatcacgaggtcaggagttcgagaccagcctggccaccatagtgaaattccatctgtactaaaaatacacaaaaaaattagccgggcgtggtggcaggtgcctttagtcccagctacttgggaggctgaggcaggagaatcacttgaacccagaaggcagaggttgcagtgagccgagattgcaccactgcactccagcctgggtgatagagtgagaccctgtctcaaaaaaaaaaaaaaaaaagttcaacgtcatttgtgttgtttcttctattatcttctggaagctttcatgttttgcctttcatatttatctccagcatccacctagggttgatttttatgtattgtattaggtagaatcatgattaattttttcctacatagatagttcatttggcccagtatcactgcctccattgtcaaaaatcaagtgtccatatatgcatgtatgtgtttctattctctgttcggttctattaatccgtgtgtttaatctttgcccccataccacatcttgactgctgtagccttagaatatgataggcattgcctcgttgccctctaaagagactgcaccaatcaagacttactaacaatttgacaaaaatgtattgggcttccagtacagtgccagatggtatcatgatgggaattcaagtctaatcatatgcacaacttctaccttaaagtgtatagtcttataagtgacaagacatgaaccaaataattccacaaatagaggtaacatatgaatgtgatggggccacaaaggggagctgtgtaggattctgtgctaaaaggaagatttgatctggtgggagaggttcagggaagtcttctctgagaaagtgagtcatgaactgatatcagaagtgtgagtagaaatgaaggaatcagaagcaagggaaaagcattttgggtggtgggaacagcatctgcaaagactgagtagaagccttcccaggacaaacagtagatcctcgtggccaaacccagagtcaggaaggtgctatgcacagaaattggaatggtgatagggaccagacctcaaggcctttaaactacattcaacagctggtttttatacctagaacaactatcctaagaacaataacaagagtcaccttgaatattccagatttagggtagttccaagagccttttcagcacaactagggttgcttcttggcaggagaagaatgtgtatggcaacccctggagtgacacatcagttttattaagcttcatctcccagctcctggcactgaacatttcatttttgctagcagtggaagcaacagttttactgtgcagtcagcccaggttctggcagcagcagcatctgcctggcaccatctcaggtctggaactcttttctccccagcctggcgagtgtcttgcttgctggagtgtcccttaaggtggacctggtgccagccgcagtgctgtgaacttgaactgtttctcctcattcaccatcatctctactcctcacccgtggaggcatgattcctactctatggataagaacacagaagcttagagagcttaagtcacttgcctaagaccacacaccttccaaagggcaaatataaaagtctccaacaatatatttttctacattttttgtggtacttttttccttttcaaaatatagagtgagtcatactcatcaggaattttacgtacagaatgacaacatttctggggagtaggacaggattctgagatgtttccaatctgtgccttgagcggatccgatgatttatccagatctaagaccctcatctcattctcggcagtgccttttaaatttggcagccaacatggggttttggttctttctgcaccaagtggagtaattaagaaggttttcatcaaggtaaatatctgctgggtttctatagaattgtggggaggaagttgaatatacaccagcacccaaaatctcattaaatgggtctgccccttgttccaggacaggagagccaaacatagcggacaggattgatgttgttttcatgaatgtaggtggccgctgtgttctttgtgggttttcaaggtgggaatttgtttgcaaatgaatgtatgaagaagccaggagttaacactgcttcagggaggttttagagcctgggggaaataatgttgttttagaatttttagaataagtattggcagtgtgttgggggaaaaaaaaaaaccctgaaaaatagaatacagatttcagttaagctctcccttcgtcaaaccacacttgcccatattggcacatagcttgatgctacagccacacctcctctgtttattatctacttagtgcttggtaatatactgtgtactatgagtaccctctctgggaaccccacaataaccctttgatgtggtttcaaacccattttacagatgaggggctattacagaacttgcaccaggtcctcagaaaccaagtgagggagttgggatttgaaccccttcacctgaacacttgcacctgcctgcagttaatacatcacattggagcagataacctgccacatttcctggagagcagggttctctgctgcaactgtgctccccagggaacttttttttttttccaagacagactctcactctgttgcctaggttggagtgcagtggcacaattttggctcaatgcaatctctgcctcctgggttcaagcaattctcctgcctcagcttcctgagtagctggaattacagtcgtgcaccaccacactcggcaacatttttgtatttttaatagagagggggtttcgccatgttggccaggcgggtctcaaactcctgatctcaggcgatcctctgccctcagcctcacaaagtgctgggattacaggtgtgagccaccgcgcccagtgccaagggacttttggcaaggtctggagatgcttttggttgttacaactggtgggggaatgaagaatgctactggcatctggtgggcagaggccagggattctgctaaccattctaactcctccctccgcaacaaagaattacctggccccaaaagtcaatagtgctgaggttgcaaaaccctgaataaaagagcacaacttctataccccttccagtgttttcacaggaagtttctgttacgaaccacacctgttttcagtaccttgtccctggtgactggttcttatcgggcttctgaactttccttccagtagagtggcaggacctgggttccatgttagagtcagtaaaacgtgggccagtcgccgtgggctcatgtctgtaatcccagaactttgggacgccaaggtgggaggatcacttaaggccaggagttagagaccagtctgggcaacaaagtaagactttgtccctacagaaaataaaaaaattagccaggcactgtggttcatgcttgtggtcccagctacccgggaggctgagttgggaggataagcccaggaaatcaaggctgcagtgagctgtgatcacaccactgccctccagcttgggcgacaaagcaagaccctatctcaaaaaaatacattataattaataaataagtaaataaataaatagagtccataaaatgctttcggcaacatggctaagaaggaggcagttgagcaggtgaggtttgcctcttggaagctgcattccaggacatttccagtactgcagactcataccttttttgctagggggattgagaggaaaatccccccaaaagggcctgaagctcttagcacttgccatgtcatattttcttcctcctgatgggaatggagcatgctcacaaattcacacctttgctgctgaacatggtatgccaaaggtcactgcactccgctgggctagctatctgcatttctatcttgaaggagcaagcaaacatgcaaatctcttgccttgccctttgtgcgggggttcggctacctggctgactgaaagaacacttcccctactacatttaaggagaactttgcttggctcagacctttgaaggatccaaaggtacctttttcttttttgagatggagcctcactctgttgcccaggctggagtgcagtggtgcaatctcagctcactgcaatctccacctcccaggttcaaatgattctcctgcctcagcctcctgagtagctgggattacaggtgcacaccaccacatctggctaatttttgtatttttagtagagaatggggttttaccatgttggccaggatggtctcgaactcatgacctcaggtgatccacctgcctcagactcccaaagtgttgggattacaggcttgagccacaatgcccagcctccatgtgtaacttttgactccccaaaaactttactactaatagcatccggctaacctgaagcctactagtaacataaacagttaattacaagattagcctctacgtatattttatgcatccatgacatacctagctttttcttaaattttttcaatgtttctaggctacacagtttgtctttgagtttttctagttgtcacaaatctccaaaaaaaattccagtatatttattgaaaaaaatcctcatattagtggagccatgcatttcaaatccatgttattgaagggaatactctttttaggtctttttatttttagttttttgagacagactctgagtgtcgctctgtcacccagactggagtgcagtggcacgatctcagctcactgcaacctccgcctcccgggttcacgtgatcctcatgcctcggcctcctgagtagctgggattataggcatgtgccatgatactgggctaattttggtatgtttagtagagactgggttttgccatgttggccaggctggtcttgaactcctgacctcaagtgatctgcctgcctcagcttcccaaagtgctgggattacgagtataagccaccatgcccagcttgtttttaggtcttgaatttgcttggagggttttattttgtttcactttgcccattcttttaagtaaattttttgttttgagattagtgtagattcacacacagtcataagaaatgatacagagagatcctatgggtccttcatcctattttccccaacggcaccatcttactaacccatagagtacaatatcacaaccaagatactgacattgatacagtccatccattttaattttaatttttttattctttatttttatttatttgtttattttttgagacagaatctcgcactgtcacccaggctggagtacagtggcacgatctccgctcactgcaagctctgcctcccaggttcacgccattctcctgcctcagcttcccgagtagctgggactacaggcgcccgccacaatgcccagattttttttttttttttttcagtagagacagggtttcaccgtgttagccagaatggtctcgatcttctgacccgcccgcctcggccttccaaagtgctaggattacaggcgtgagccaccgcgcccggcccactccatccattttattcagatttccccagctttacatgcattcaccttgcacgttttttgtttgtttgttttgttttgtttttgagacagggtcttgctctgtcacccagactggagtgcagtggtgcaatcaatggctcacaatagccttgagctcctgggcttaagcaattctcccgagcagctgggaccacaggcacatgcctccatgcctggctaccttttttattttttgtagagatggggtctcactatatcgcccaagctggtctggaactcctgggctcaagccatcctcccacctcaacctcccaaagtgctgggattacaggcatgagccaccgcacctggggccagctatgaaagattttgttttgaggttctcagttgccattgccactttgctgaaaaaagcggctcaaattccagtggagtgtggagtcagtcatgatgggtgcattcccaaggctgagacatccctggagtaactttaggtgtctgtcctgggctgtgtcctggcagagaaggaagcacgggagaaggaaggcaggccgccgcatcctaacacctgagttccggtttgggacacacagagaactctgtgctcccgcctacactctgccttccccgacttcctccccattcccgacgtttcacttgattgtcaggcccagctggcagcattctgctggagccactgggccagcaagcctgagaggtgatgaccctttagtacctggggacaagggcatttgaccttgtctgatcagtgactgtccctatgagctcagttctttgttctgggtctcgagtctggagagccccagctttgcttggggacgtcctttgcaagtaagagcagcatgtcaaagctacgcggttttgggagaaagtgctgagtctacaagacatctccccactggagctggcattgtgggagagagaggagaactcttcagagatttctgttgaaagactggaatgagaagcagatggttcatactggttaagaggccagcgccttgctgtagttttaatttcctgcaggatcccaatgattgtaaagattgtgtttctccacctctgcagaatcacccctaagcactgcattcatgattctgcagaaaaactaggcagccagacagacctggttcaaatcccaactgccgcttacttgtggcaagaataggatgagttttgctcaaccttatgtcagcctcagcttctcagtctgcaaactggcactactccactacatcagaagacgtttaaaagcatcagtgatgtctggaaatcagttagcatcgggtgagtgtagataaagcctaatccaccacagggcctttcggctttctttgcctccgttttctcatctgctaagtggaaagaaattttccttgcattggagtgatgttaagtctgaaaatacatagcactcgaagtcagtagagatacagagcagttttcagtggaaactgaacagagtggtttgactccagtacaccagctcaatgccagttcttggggcagagcagttgacccgagggagtggataattaaacaatgcacagaaccttagaacctgggactatgagggatctctgagctgattgggtctaaaccaagtccctttgcctgatgcttaaagcctctctcctgcatcttagacaagaaggcgtccagcctccagagtggatcccgctccaaggcaaggagctttcttagttattgagccaaaatccgccttcgattttgtaacttattgaagattgcagccatagtacaggacagagctgggactcaaacccaggtctgagtgcacagcccatgaccctaacacctgggccccattacctctgtaatccaaggttcctactgttgcactccattctgtccaggactcagcacagcactgggaacccaggaggattaaagaagggccagggtgactgtgcagggggaccctggggaagaaggctgacctctggtcgggaactctcaaaaattttgggatcaggctaggcgtggtggctcactcctgtaatcccaacactttgggaggctgaggcagacggatcacttgaggtcaggtgttcaagaccagcatggccaacatgatgaagccctgtctctactaaaaatacaaaaattagccgtgggtggtgcacgcctgtaatcccagctactcaggagtctgagacaggagaatcacttgaaaggaggcagaggttgcagtgagccgaagctgtggagccactgtactccagcctgggtgacacagcgagactctgtctcaaaaaaaaataaatagagaagtttggtatcagcaacctgactgtggtccctgagctctggccagcccttcttctggcctatagatgctgataggcccatgggaccattacaggagtgaataggaagtgttcccagcagccgggtgcctggggggcagattggagaagcctggtcttggacaggcctcttcaagctgaccccagggcatccacttcccctgtggaggaagctcctcaggttaagtgaacattcattgattttaattttttctcctggaaaactggcttgctgctcccatccccagaggcatccatgtcccagggaattaccaactctcagcatgtaacttacattgcgcgtcgactgtgaaatcaaggagaacaagagacgaggagcttgcgtgctggcggagagggaccgatgaatcatgaacgaatgagaaagagacagataagggtgacaaaaataaaatgtgttggtctgaaagcagtgggactactttaagttggggtcaaggaaggctgttctgagcaggtggtatttgggctgaggaatgagacagccgtttcgggccccgggggaaactcattccaggcagggacacagcagatgcatggcaggtcccacgttgggaggacttgaggtcatcattagaaggttgggttttattctctctgcaattagagatgtttggtaggtttttaactagggagtgacatgatgtgtttcactttaaaataatccctatggctgctccgtgcaaagtggattgaacaagacctcgatgggatcagagagaccatttaggtggctgccacagtcaattacaagtggaagtggcttggattcaggtggagacaggaagagaggatgatctggaaatgcccggaacagtccaggcatgagcaattgcagtcagtgcctgggttcagatccaagcctttggaatcatgtatgaatttgaaactccctttcctcctgtgcaagttaaaggttttttgttgtttgttttttgttttttggttttttttttggagatggggtcttgctctgtcacccaggctggagtacagtggtgtgattgcagctcactgcaacctccacctcccaggttcaagagattctcctgcctcagcctcctgagtagctgggattacaggtacaagcgaccacgcccagctaattttttgtagttttagtagagaaggggtttcaccatgttggccaggctggtcgcaaactcctgacctcaagtgatccacctgcgtcagcctcccaaagtgctgggatcacaggcgtgagccaccgcacctgaccctgtgcaagctttaaattgcaggaggtgatcctttgtacattggaggtggtagtagtaatagctgacatgatcagtaaaaatattcattgagatcatacattcactttctggagctgccgcaaaaaaattgtcacaaactgagtgactcaaaacaatggaagtttattctcttacagttctagaggccagaagtccaaaatccagagatcagtaggactgtactctctctgatggctctagggttccaactttgcctgctgccggaggagtggttgagaataactgagtacatggccctccttcagcaattgctctgttctgttgtgtggagagatcacattttgtttatctgctcatatgctcatggacccttgggtttgtttcccccttctggctcttttttttttttctttgagacggagttccacttttgtcccccaggctagagtgcaatggcacgatctcagctcaccacaacctccgcctcctgggttcaagtgattctcctgcctcagcctcccaagtagctgggattacaggcacctgccgccacacccagctaattcttgtatgtttagtagagatggggtttcaccatgttgtccaggctggtctcgaactcctgacctcaggtgatccacctgcctcagcctcctgaagtgttgggattacaggcgtgagccactgcgcccggccttctggcttttatgaatagtgctgcaattggcagggcacggtggcttatgcctgtaatcccagcactttgggaggccaaggtgggcagatcacgtgaggtcaggagttcaagaccagcctggctaccatgatgaaacccatctctacaaaaaaaatacaaaaattaaccaggcttggtggcacacacctgtaatcccagctactcgagaggctgaggcacaagaatcacttgaaccaaggaggtggaggttgaagtgagccaagattgcgccactgcactccagcctgggcaatagggagaaactctgtctcaaaaagaaaaaacaaacaaacaaaaaataagtagtgctgcaacgaacagcagcagataagtatctgtttcagtccttgctctcagtctttggggtatgtacctaggggtggaattgctgggtcatatggtgattctgtgtctaactttttgaggaaccgcctgttttccactctgtgccacatagttttggttgaagtagttacagaaccgccccagatcaaatgtgggaagagatagatgccacctcccagtgagggactactaggtcacagagggaagagattggggaggggagatgctgttgcggccatctttggaatgtacaaatggccacttgagtagtgattacttcatttatttatttttgcagggaattattttttttaaagggcctcggatcacctaaggtcaggagttcaagaccagcctgggcaacatggtgaaaccctatctctacaaaaattagccaggcatgatagcaggtacgtgcaattccagctacttaggaggttgagtcaggagaatcacttgaacctgggaatcagaggttgcagtgagccgaggtcgtgccattgcaatccagcctgggtgactgactgagactccgtctcaaaaacaataataaaataaaataaaacaggacctcactctgtcacccaggctggagtgcagtggtgtgatctcggctcactgcaaccttggcctcctgggcttaaacgatcctccaaccccatcctcctgagtagctgggactacaggtgtgcaccaccacacctggctgatattttttggtaatttttgtagaggcagggttttgccatgttgcccaggctggtgcagtgaatatttcctcttctcttctcttctctctctttctctttccctctttctttcttttgagacagaacccaggctggagtgcagtggcacgatcacggctgactgcaacctcgacctcttgggctcaggtgattctcccacctcagccttccaagtagctgtgactataggcgtgtgccacctggctaatttttgtatttttttttgtaatttttgtagagactgagttatacgatgttgcccaggctggtcttaaactcctaggctcaagtgatccacccacctctgcctcccaaagtgctgggattacaggtgtgagccaccatgcccagcctgcagtgagtagttcttgatgcttgtcctgaacgcacactgtgctgggtgtaggatacagacatgagtattgcaggtgtggtttttgccctctcacagcttgtggttacttggagaagagccattaactaaaattgcaaaattaattttggggaaagggggctggactttcctgatattctcttcctccttttatctgtaagttgatgaataacttaacatagcaaagtgcactaaacttacatacgcggctccatgaatttttacctgagaatgcaaccatgtaaccagcacctagatcaagatctagaccgtccccagcccccagaaagttccctcataccccagtgggtaactgctatttaacatcttcaccatagattagctgagcctattttagaactttataaacggaatcataccgtagatactccttgatgtcaggcgtctccctctgcactgtttgtgaaatcccacaattaatcccttttttaaagagacattgacttgctgtcacccaggctggagtgctgtggcttgatcatagctcccctgcagccttgaactcctgggatcaagcagtcttcccactcagcttcccaagttgttgggactacaggtgtgcaccactacacctggcgcattttaaaacattttttttttaaatttagagacagagtctcactatgttgctcaggctggtcttgagctccctggctcaagcagtcatcctgcctcagcctcccaaagtgctggcattacaggcatgagccgccatgctggccttaattctttttttttttttttttgctttgttttgttttttctctttgagatggagtgtcactctgtctgtcactcaggctgcagtgcagtgctgcaatcttggctcactgtaacctctgctacccggattcaagcaattatcttgcctcagcctcccaagtagctgggactacaggcacacaccaccacacctggctaatttttgtatttttagtagagacggggtttcaccctgttggccaggctgctctcaaactcctgaactaaagtgatctacctgggcctcccaaagtgcttggattgtaggcgtgagccacaataccagtcttgaccttaattctttaacaacagcagtatggactgtgaaggaaacatgttctgtgccacaggagcatatagtagtgagctgtaatcaaatctgcagtgaataacgtggtagtgagctgtaatcaaatctggagtgaataacgtgaacactgggaagagaagcactcacccttactaagcatgcactattggccaggccctgcccttagaaggagagggtgagacctgcctggccagaggccacaagctctggaacagtccccgatgggttggaccccacctctgctcttcactatccgatgtgactgagcaggtgacttcactttgctgtgcctcagtttttccttttgtataattaaaatactgatggttactgcattattccccaaaccttaatgatcaataaacatggagctctgtaatgagggagcttgcattgttctggggatgctgaggagatagaggtaaaataggagatacctgttacgcaggaagaggtgagggaaggggagagggagggcaggggtgcaactgaaaatcagacagccaagacctgaggaagacagggcgggagcccctggctctctgtggaagagatttttggggagtggaatgggcaggagcaggctcttgggtcaggctcatctggcacgttcaaggaaccacgagggggccagtgtggctggagcagagcaggagggggtggcagggaggggagggacatggaggtgtaggtgtaggggggtcctgcaggcctcctggaggccactctgatggcattggctgtcactctgcgatgggggtgtattggttcgttctcaaactgctataaagaaataactgagactggagaatttataaagaaaagaggtttcattggatcatggttctgcgggctgtacaggaagtatagcagcttctgtttgtgggaagacatcaggaaacttacaatcatggcaggaggtgaagggggagcaggcatcttacatggccagagcaggaggaagagagagagcagagaggtgctgcactctttttttttttttcttttggtgttttgcccaggctggagtgcaatggcacgatcttggctcactgcaacctccgcctcctgggttcaagcaattctcctgcctcagcctcccaagtagctgggattataggcatgcaccaccacgcccagttaatttttatatttttagtagagacagtgtttcaccctgttggccaggctggtctcgaactcctgacctcaagtaatcctcccgcctcggcctcccaaagtgctgggattataggcgggagccactgcacctggctacactcttttaaacaaccacatctcatgagaactctatcacaagaacagcaccaaacggatggtgctaaactattcatgagaagcccacccccatgatccagtcccctcccaccaggctcctcgtccaacactggggattacgtttcaacgtgagatttgggtgggacatggatccaaaccatatcaggggaccactggaaggttttcaccagagggaggactggtgtgatgtgacctgacttttgcaaaggactgctctggctcctatgttgattgcacacagaccacagcccatgagaggagaaggttgatgcttaggacacggcgggagccctggggcttggatcacaggggaaatgatggaggcaggaaagtgggcagattctggatctgttttcaagatggagccaacaggattgactgatggactaggtgtgatgcatgagagtgtgccaggaagatgcaggcaccgagatccaggtagagttgacgaacacctctctactgtcaatgtattgtttttacgggtaccttgtatttatatgaaaggatactggctttctagatacagtaatgatataaaagtttccacttaaattactgctgttaagggccgggtgcagtggctcacacctgtaatcccagcactctgggaggctgaggtgggtggatcacctgaggtcaagagttcaagaccagcctggagtttcggccgacatggcgaaaccccgtctctactaaaaatacaaaaaattagccgggcgtggtggtgtgcgcctgtagtcccagctactcgggaggctgaggcaggagaatagcttgaacccggaaggcggaggttgcagtgaaccaaaatcgtgccattgctctccagcctgggtgacagacagagtgagactctgtctcaaaaaaaaaaaccaaaaaattattgctgttaaaaagcaagataatttcaagcaaaagtcttacaaatgttggtaaataatagagcgtttaggtggatggcaaatggtgacttagggaaagcacacactttgtgtgttgctgacatgttagcagaaaaaggagacagtgtctgagggcaaaagtggccctcttgggtctgtgtccgttctctaaaaactgaactctgcttgaaattgagtgaaatggatcaccagtttgttattgggaagataggaaagacctatagtttgaaggcttggaatgcctacatgggggaccagcaaactgtttctgtaaagggccagacagtaagtatttttggcatgtgggccatgtggtttctcttgccactattcaaccctgccattgtagcgcaaagcagccatgaattaataggtgtagctgtgtttcaataaagctttatttaaaaaagcaggccagtggccatagttgtggatccttagcctacagtctgcatcccagagcacagagcctcaagagcatcctctttcctggccttccagaaatttgagacttcttaactccaagctttcctttcttccactatcttgggatgagtcgagaagtttccctttgtgtcaactgcaggtgcactaaactccctgaatgtgctgacctactttcaactttaagtatttccacctgggaactagaatcaaatttgactggttcaatgctagaaagctaatgtcctttttatagtctgtttggaagctcatctcctctttccacaccttcggaaaccaaacggaacacagatcaatttccaagtgcctctggggctctctgttaatgccacgtcaagttactcaatagttgttttcctataattaaatatctggacacattgggctgccatccactgaagttactctcatgccctggtgaagtatctctgtgcctattatttgagaatgctagagagacttcttttctccaaacatttgataaaattaataatacaggttattaatgaagaatcagaaactacaaaaaggtggcaacaaatagacggccatgccatggcctcatatccaaaatgcaacggtgctaaacagaaaacacatgtctttccagccttgctttattgtgtagcagtttatgattttgtttttttgtgcctgtaaaaaattgtagccagactgcatatacaattttacattctttttttctctcattacatggcttaaaaaatcacttccctgtctttttacacagttttcagttaatgtcatataatcaagctgttgtaccacaacttatttgagcaatcctctaccattggtcatttacattgttttcaactgagcacgcttcttttttaaaaaaaaatttttaaatttttgtacaaatggggggtctcactatgttgcccaggctggtctcgaactcctggcctcaagcaatcctcccacctcggcctcccaaaatgctgggattataggcatgagacactgtgcctgtggctttcactgctctgaacatctctgagcatagaactattccttcatgtagtattgcttgcattagctaaatttctagagttgggattttttttttgatggggtgctgtattagtccattttcacactactataaagatactacctgagactgggtaattcataaacaaaagaggcttaattgactcacagttccacatggctgggaggcctcaggaaatttacaatcatggcagaaagtgaaggggaagcaggcaccttcttcacaaggtggcaggagagagagagagagagcacacagggaaaactgccactttaaaaccgtcagatctcgtgagaactcactatcatgagaacagtatgggggaaactgcccccatgatccagtcacctcccaccagatccctcccttgacacatggggattacaattcaagatgaaatttgggtggggacacagagccaaaccatatcaggggctttccagtctttaccggaaagcctgctagacaaattttaaaagagctataacactgagttgggatttcttgaggtcaaaatatttaatatctctttatgttgttttccaaaaggtctggattcagatactctccagcagtgtctgttgggagagagagagccaggggtgatggtctggctttcagacctgagatcagacaggcagatagctgaactcccaggcagttcgttggttggtggttggttttttgctaggttttagttgtttttttgttctgaatctcatttcaaagagagcagattgactccacacctaatgcacatcctcagtttcacaaagcagctaagagcaagtcaggtttcatagtccaaatgatgctattgcttgagtgtaattgtgcaccagccattagcccacatttcttggtagagcctcggtgcccttggattatgaatttgcacacagtggaatcgcaacaatttgttttatagttctgtcctttgagggagtgacatttcttccaaggtctcagctcctttaatctataaaatgggaataataagaattcactggacaaatattcagtgtgcctgttgggagtgttgggcatgtgcagtccatctctggggctagcatggaaggcgtacattaaaaagatactcatgctggctgcagtggctcgtgcctgtaatcccaacaccctgagaggctgaggtaggtggatcacttgagaccagtctgggcaacatgatgaaactctgtctctataaaaaaaaatatatatatatatacaaaaaattagccaggcatggtggcacacaccagtagtcccagccgagaggctgaggtgggaggatcacctgagccctgaaggtaaggctgcaatgagctgtgattttaccactgcactccagcctgggcaacagagtgagaccctgtttcaaaaaaaaaaaaaaaaaaagaaaagaccaggcatgatggctcatcatgcctgtaatcccagcactttgggaggctgaggtgggtggatcacttgaggccatgagttcaaaaccagcctggccaacatggtgaaaccccatctctactaaaaatacaaaaattagccgggtgtggtggcacgctcctgtaatccagctactgaggaagctgaggcacgagaatcaattgaacctgggaggtggaggctgcagtgagccaagatcgtgccacggcacttcagcctgggagacagagcaagaccctgtctcaaaaaaaagatactcatgcaaataaatgtgtaagtactaactgtgatgagtggaaagaattacgcaagaagctataagaaattacagcaagacaattgtatatccacaagaaggtttataaatgcttctctgaagagataacatggagtgtttgcgacctgagtgattcctaggttttggctaaggaggaatgagggaagcagacggggctgcaagaatggcaggtgcaaaggccctgaggctacagagctctgtgccctcccggaatcagagggtggaatgggtggggtggcatgtcagtactcagaaaagagatgcaggcagaggtgggttaggcaaggtcccagatgcctcatgaaaggctgggagccaccactgagctaagaagtgacaggctaggggagtggaggctggaagatgactctctccctgtgctagtgagcaatgcccatggtggtctagcagaataatcactttttttgttgtttttttgagaccaggtctccctctgtcacccaggcttgagtacagtggtgcaatcatggctcactgcagcctcgacctcccagactcaagccatcctcccacctcagcctaccttgtagctgggactataggcacacactaccatgccagggtaatttttttttttttttttagcggagacagggtttcactatgttgcccaggtctccagctcctgggcccaggcaatcctcccatctcagcctcccaaagagctgggattacaggcatgagccaatgtgcccagcccagagttagagacattttagaggcaaatgagagtcccttttcttcctcctttccctaatttcaccctcaagctgatgaccatgtaattgtggttatgttcaagaagtgagagctaaaatgggatttacctttacgtcagtttgcaagaggcaagagagaagcttacatttctaaaacagcagccacaccgtggaacctaaaagctagctggacttaactccagtgcatcctagccaggaattagggaactttttttaaactttatttatttattttgtagagacagtttcccaggctggtcttgaactcctcagctcaagcaaacctccagccttggcctcccaaagtgctgagattacaggagtgagccactgcacccggccaggagttagggatattggcaaccccaggttatcatcccagaaccagtcatgaaactcatgaaatcatcaccaccatccccatctccaagagaatctctctagtacttgcatgtcatgattaaaatcagtggtcagtcttggcctgagtaggaggagaaagctggaaccagtggacttcctgatatgtgatcccatgaaagagtgaagtccgtcttgtgttcctatgggtagctgctctggagggtggaagcctgaacttgatcattccctctaattctcagcccatctagacaaaaggagtctgctgggagagagaatttgtttggtttattatcagttctgaaggtctcacgctggtaagaagttcagagttagttgcagactttttaactcaagagacaggatcttgctgtgttgcccaggctggagtgcagtggcatgatcgtagctcactgcagcctcaaactcccgggttcaaaggatctttctgcctcagcctcccatgtaactgggaccacaggtgcacaccaccacacctagctaatttttttattttctgtagagacagggatggcagtggtggggtggtggggggcgcaggtggctcgggggcagggttgtgtgtctcactttgttgcccaggctggtcttgaactcctgagctcaagcaatctccctgcctctgcctcccaaggtgctggaattacaagtgtgagccagcgcacctggccaatcaaattctttaaaattaagtgccacaagttaaattcttttcttagaggtttaaatgttacagacacatgactgacatgtaataaatattcagcattcattggcaagaacaggagaagccagatggctggataagctttgggctttggttcaaactgcagttccccagataaatagctccgggatcttgggcatgttctaaactacctgggctttattttttccctctgtagcttgtaagagcacctactccacagactcatgagaataaacagcaggtgctcaataaacggcggccagtattgttatttaaggtttacactcactttaggtgtatgtcagtcccacctgagctacatttgccaatgagtcacgcctggctaccaagtgcccgaaatggggctcatctgaatgggggtgtgccgtaagcataaaacacacatccgattttgaagacttgctatgccaaaaaggatagcaaaatattaacatttcgctaattagttttcatactaattagttttatgctaatttattacctgttgaaatgatgagattttgaggacacgtcaggttaaatagaattaacattaatttctttattttcagtgctttattttttaatgtattatttatcttttttcaacttttgcctttttccatgtgttccaaaagattaatttcatctgtttcttttcttttttgatgtgaccactagaaatttttaattggcacatgtgactcacatttttatttatttatttatttatttatttatttatttatttttgagatggagtctcactctgtcgcccaggctggactgcagtagcactatctcagctcactgcaacctccgcctcctgggttcaagcgattctcctgcttcaacctccagagtatcagggattacaggctcctgccaccatacccagctaatttttgtattttcagtagagacggggtttcaccatgttggccaagctggtctcgaacccctgacatcaaatgatccacccgccttggcttcccaaagtgctgggattacaggcgtgagccaccatgcccagcctatatttattttcaatagtacaggtctaaagacatgatatagaaagtaggaatggttaaggagtgagaaaagcgtggacttggcaatcagaaagatgtaggggcttatcagggtagcagtactccctgtatgctattagagcagtcagttaactttttttttttttgagacaggctctcactttgtcacccaggctggagtacagtggcacggtagcacaatctcggttctcaagccatcctccctccgccgcctgagtagctgggactacagacgtatgctgccactcatagctgatttttgtatgtttgtatttttttatacagacctgctttcactgtattgcccaggctggtcttgaattcctgagctcaaggaatccgcccactttggcctcccaaagtgctaggattacaggcatgaaccaccaagcccagccagttaacctttgtgtgcctccactaatatctgtgaaatggaagcaaaaatccccagcacaaaagcattgtttcaatcaatgagataatacatggaaagtacttagctcagtcctaggcacaaaataggtgctcaaacacaaataaaggttatagcttttgttacatgtattagggatgtttagtattcagaagggggctaggtaaaccctgaagacaaatgaataacagtaactctcattggtttagcaagatagacttttgcatgccatttctacctccatgttgacatttgaccttcagaatgaccttgggaggtatgatcaagcccttagagagatgagaggctgggcatagtggctcacacctttaatctcagcactttgggaggcgaggtgagaggattgcttgagcccaggagttcataaccaacctaggcaacacagcaagtccccgtctctacaaaaaaataaaaacattacccaggggtggtagtgcatgcctgtagtctcccaactactcaggaggctgaggtggaaagatcacttgagtccaggaggttaaggctgcactgagagagagacagagagagagagagagagagagagagagagagagaggaaataggctcaggagcaagcaccttcacatctgagcaggaactagaactaggccttcttgtaccaaccctctggattctctcaactttccaagcctccaaagtttgtttctgtgtttacttcactctctggttaggtggtttctacaggagtctttagaacaagagagaagaccgacatttattacaaccagcaaccaacattaatcactttcccatatcagtacataaagcgccatcgcattctttttgttgaatgcaggttattctgcatgatggatatacccaagtttattttaaccagttcccactcatggacaattaggttattttcaatttatatcaatgagacaaattccttcaagtagaattatgctagggatcaatggtttgcgcatttacaattttacagattttgacaaattgctctccaagccatttgtatgaatttcctctcctgccagcaatgaatgaagtgccagttcccctgcatcgtgaatatggccaaatatttcatgataaaaattcagtgtggagaaagcagaggaaaggtgagatagcagctgggaggccgtcaggaggtgggggcaactgtccaggtaggaaacgatgggtacctgaacaaggacaaagtaaggagggagagggtggagcccagagctaccgtggaagtcaaattccgtggcgtggtggtgaaggaagataacaggaaggaggaatcagatttcttgagtttctggcttgaacaaatgagtaggcagtgggtctgttaatggagatgctcaacataggaaaggagataggtgtagtgaagagaagatgatgactgtgagaacgtattgcacttgatatgcaggacaccctgctgaaccagggagaggatttggggatagtgaatcatttgtggaaaccgtgagtgtccatgagctctcccagagatgggtgggtggaaggatggatggatggatgattggatggatggatggatggatgggaagatggatgggtggatggatgggtggatggatgggaagatggatggatggatggatgggaagatggatggatggatggatggatggatggatggatggatggaaaaatggatgggaagatggatggagagatggagggagagaaggatagatggatgaatgaacagacagacaaaaaacagaaacctagactttattgtctttagattgaaccatatgaaattactatttttggccaggtgcggtggctcatgcctgtaatcctagcactttgggaggtcgggggggaggggcagatcacttgaggatcagcctggccaacatggtgaaacaccgtctctactaaaaatacaaaaattagctgggcgtggttgcttgtacctgtaatcccagctacttgggaggctgaggcaggagaatcacttgaacccgggaggctgaggttgcagtgagccacgatggtaccactgcactccagcctggatgacagagcaagactccatctcataaaaaaagaaaagaaagaaattactatttttgttttaaaaattaccaagtgcttacttttatgcaggttgaaatattttggggggaaggatactgatgtctacagttaactttgaaatgcatcaaaaacaggatgtgataaagcacatgtggtaatcatgttaatggtagaggctagtagtgggtatataggtatttaccgtaaaattctttcggctttgctgtgcattggaaagtttcataaaaaatcatgggaaatggtctaggcgccgtggctcactggtgaatattgtcaatttcatgtggttcccctcaatttatgttttatttggtcaaaaagatccttccaggttcccaatctgtagcatcaacagatctgctttgtggagtcccctttggcccttgttctgccccgatttgggggctgggggctgggggctgacgtttctccctctcaaagttcaggttgaattgccctaacgtgctgattactgcaccgaggatgccggtatctggcttgtaataattatagatttcctctgcgatttgatcccattggttgcctcggcaacggcgtaatagctcaaccgaagcgctgtcacggtgatttagaaccagtgtgtctctcctgcagcctccattctgggtgcctccacccccttgccgtcgtcatggtaactgatgagcagcatgtgaccgaaagctctctgcccccccaaccccataccccctccccatcttgtgatcaccctcattacctcttctgggccccctgtggacctgcgttgacccagcatgggctacaatgggggagttgggtaatcgctcccggtaggttcctccccaacccccgaggcggggtcaggtggagcgtgggcgccagagcagcccctctgccttgggtgtcttggagatgacttggcgccccccggagccccgtcatggctgtggctgcgtccacaacactgcatcagcagagtcctggggaagccatttaggaatctgaagcccgggatttctgctttgtcccttcaggggttcctgagcctgttaaaaaaaaaaaaaaatctaggaagaggccctggaaggaaaaaggggagggagatagcctattttacaaggtctgaaatgatgtgtcttatccttctggcttaaaccaagctgggcttaaaacatcttttaaaaaaaatctgtattctatttttttctctctgtttatcgctctccttctgcctctgttaatctttgtttctgtgtagttgcatcctgtttctgtctgaaaacccttgtctttctgaatccatctttcagtctctcacattctgtctttcccctcctccttcaccttccctccgtccctctcccttgcgcacttgccgggtaccagctgagtgcatccttttcccaaacctgctctgcttccaaggggcccttttctgtctcctccacctgtccccatgttttggggactgcctggaaatccgggacaccctcctgaggagggagctggtgcccaacggcacctcttaggatgaacccagccagctgcgttcctggcctctgcagaatggcatacagaaggcattttaagcaagcgagctgagctcgccgcaggactccgactaccaggcaccgtgagtgcaaatgtgtatgtgtgtctctgtgtgcatccttacatgtgtatgtatttgctgccatggggaggtggtgccagtgtctgtcagtgcctgttatctgtggtgttggggtgtgcaggtcgggggggcacacacccttgtgcatctgtgtacatgcgtgcacatgtgcctggctctctgtgtgtaggacacacaaatgtacttaacagatttttcaaggacactttgtgaacacagcaggaggagaccctttaaagtggggacaaaataatgaaagatggatatagaaatgatgagataaggaattgctcttatcaataggcttgcaacaccacagtccgcctgcatctggtcctaggaaatgaagtgagggtcaccttgaaaaggcatttttgttcaagccgctaaataaatcctttcccttcgttctaaggacaagaacagcacaaacacacacacccctttctctttgaaactcaggggaatggaaggctcagggggcgctgtcactgggcatttcagatagagtttgcagtgagaatctcagttgacagccagggcggctcacgccaagagtagatgtcaggaagctctggacagccgctctcttcacatcttgtggctgattagaagttcattttgaattttttcccagaagcagcctatgccccaagaggcaaccagaagaaagcaattttagaaaatgcaatttcatttgcagggcaagatgtgggaatcctgaaaggttggcgctgaagatcctgcagttggtgtgtgcaagctggcagccaggccgctgccggaggaagggggtcctctgtgctttgcatgtccctgggtatttgggaaacttggcagccggttgctctaagtgaaccctgactctggagtaggcactgggcaccctggcggagaggacagagccggagacaaggactggcctcagggagtttccagttcaaataggaacagacccgatcacacgcgatacgctcaccctcagacacattgctgctgcctgcatttcctccgggctgccatcccccttcccctaccctggcctctgtctgccacgactgcccttgtctacctgccaagctctaattatcgttaaacatcccgtcactgcttcccggaaatctttaacttccacccaagaacagctaacactatacgccctcctctacctgcagaaatcacttggaccctctgacatcacatgtccaaccgacctctttctccacatttgcccgtgagctgcacttcattttgcaaggacataaagaagactattcacgcaactacatgcaaaatgactggctgggattcctaaaacgccaatgtcttttaaaaggcaaaagggctgagaaatggttccaggttaaaagagattaaagagccatgagcccaaatgcaatgtttgatcctaggatgaagcctggatcaggggaacagaaaacacttgtgggctgggctcagtggctcatacctgtaatcccagtgctttgggagtccgagggaggaggatcacttgaagtcaagagttagagactagcctcaggaatatagggagaccccatctctacaaaaaataaatataaaaataaactaaccagacatagtggtgtgtgcctgtgatcccagctactcaggaggctgaggcaagaggatcacctgagcccaagagttcgaggctgcagtgagccatgagccatgatcatgccactgcactccagcctaggtgatagagcgagaccctgtctctaaaaaaaaaaaaaaaaaaaaaaacaattaaagaagttttagggataagtgggaatatctgaatatagattgtatgttagataatagtatttatagtatttttatgtcatgaatatgccaataataaataaattaaaaaaagataatagtattttattaatggtaccttcatgagagtgactttgtatctcagatcatttgtactgaggttatgtaagagaacattcttgttcttagaagatacaggctgaaggattcaaggatgaaatatcacaatgtccacaactaactcaaataattcagaagacagataatagagtgggcacgagtgtggcaaaatgttaacagtttcgaggattacaagcggctgtggaactatgttcataacttttatgtgggtctgaagattttccagtgcccaggctgggcactctgcttagctttgcgcgtggattatctcatttcatcctcagagcagcttggggatgggagagctctatcacacccattttccagtggagaaaacagaggcacagctagttgtaagcccaggccacattatgcccccaccccctgttttgtgaaatttagtactaaagatactacatggctgtgtgatgtcgggcaaatcacttaacctctctgtgatctgtttccttttttcttttttttgctacgagtggataattataatatcagaaggttgttctgatgggtattatgatatataaagaacttagaacagggtttggcctaaagtaagcgctgagcaagtgtctgctgttgctgctgctaattgtatttgttgctgcagtcgtgatcccagcaccctcaccttggccagtgatggggaaacctgaagggtgttttttcttctgtacccagggcgtgcttcatgggtttgtgatctatatggtcacacagggtcccgtgttcagaagatccccccatgtcactgacttgcaattcgtaaccattttctcacaaggggcctcgaatatttattttatgcactgggtcccacacatcatgtagccagccctgtctgctctccctttttattggatcccgttgagagcctctcctagactaaactacttgtgcctacgtcattgcagcagacaggcccaggcaggccgtggcatttcagcaggtcagattgtatgttcctgtgaccacactccaattctgatgcaatgcgtcagcccgcacaggccagtacagtagccgttcatcacatctggtcattgagcatctgagacgtggctattctaaactgtgatgtgctgtgagtgtgaaattcacaccagattttgaagacttagcacacatccgaaaaagaaatgcaaaatatcttattaataactatattgatggccgggcacggtagctcgcgtctgtaatcccagcactttgggaggccaaggcgggtggatcacttgaggtcaggagtttgagaccagcctgaccaacatggtgaaactttgtctctactaaaaatacaaaaattagccaggagtgatggcacacacctgtcatcccagctactcgggaggctgaggcaggagaatcgcttgaacctgggaggcgaaggttgcagtgagccgagattgtgccactgcacttcagcctgggcaacaagagcaaaactccatctcaaaagtaataataataactatattgattatgtatcaaaattattacattttagatacaatgggttaaataagatacatgaaaaaaattggtttcagctgtttttgcttttttcatatggctaccagaaaatgtaaaattacctatgtggtttgcattgaaagcttgtgttatatttcttttgggcagtactgtcttagagcatactacctgtgccttcattgtgactccaaaccaaaccagaccagcaggtgacagtgcagtgaattgatttctaagttacattaatacacactggccctggtgctgtagcttagaccagagtctcccaatcaatccatcaggcacctctttctgttccttcttttctgttcctttctctcttaagatagtccaagacactgatttttatacccagtgagtttgtcaagtagcctaaagatatttttgaggcaacgtattgggtaaaaagaaactgaagttggaatcagaaggactaatttaagaattaaattaaaatcccaaatcacctctttttttttttcttttagagatggggtctcgctctgtcacccaggctgatctcaatctcctgggctcaagcgatcctctcaccttggcctcccaacatgctgggattacacatcaggtcccaggtcacctcttctccatgaggtgagcttgggcatgttatttctctgtgcaaggaaacagaacagcactagctttaaagcctcacagacccgagtttgaagactggctctgccgttgacaagctgtgtgacacaggataagccacaaccctctctgaacctcagtctcatcctcagtctcatagcgctgatgatgcatactgtgtaatactgttgcaagaatggaataagatgaagcagaacaaatgtccaacccagcaactggcacatggcaggtgtgcgcttaatccctgcattcttagtgggatcagtattcccaagagagtgaacatttatgggaaagaaaagaaatcttactctttatgaataaagtacagatataaaatacaatacataagcagatgtacaatttatctgtggaattaaaatttcatggggtatgtagctaataaagaatctttaggggaatggcaatgaaaaaaagtttgagaaacattgcattaatctgacggatgggactcagaggttgcttttcagttcagttcctgtagttgtcagagtatagggctgaaactccatgattgaattcaacaagtgtttttgagcacctacaatagccagacaccgttctggaccctggaaatggagggcaccctccaggtacatgcttcccagagctggtctctgaggtcccctgagccagcccctgcctctgggaagatgacccctaaatggcagcctcagtcagggggcagggttttagagaacaacaggaatagaagtatttgcctcccaggagtagataagacggtgtatgtgaaaccttgacacgattggcattcattcgtaaaatcagagcagatacctgcacacacaggcataaatgaaagatactttgaattacagaaaagttaaggtctttgcaagtgcatgtaggaatgctgccaggcacacagcgtgactccagccaccaacaaagtgtttccaagtctggagctgtgtggtccttgaaggaaatataaatgtttcacttgttatacgctgtgatttttgcgtacttagcggtttctggagtccgtgaaagtggtttgttttctctgaacgggaagtgcgtttcctccaatcacaccgacctgatttgtttgttgcttgttgggcctccccacgggaacacgagatcccacagaacacagcaggacgtgtccttgtttactgaggaatctctggggctcggcacaggtgtgcagaaagcatttattgaactgaacaaacagattttacaagccggaccttctgtggcgttggcccgggtagctacttcagcatgggtccaagcatcctttctaagccaattccattctttcactcctcctcccttgtaggatcagaaatccaaagctagcttatccttttgcagatgtttctttccatattatttcctacctccagaacaaaggctatctgtgtctcacattcggaggcttggatgtgaagccctgtctgttcatttttctctccagttttttcacaggctgggtaactacctgcctgctagcaacgatgtgttcgttctccctggattcctgattgaggtgggcagagaggactctgagacaggagcatgaggatgaggcagatcagcttctttctcatgaaatctggatgttgaggctggtagcaggaccaccgcatgtgccaatagtctttagcagctcatcaggccatagaagaagtgcctttactaacttcaagtccagcctgggaaacgtagtgagaccttgtctctccctgtctaaaaaaagaagaagaaagaaggaggaggaggaggagaaggagaaggaaaaaaagaagttgttcacaatttttgtttactcgtttacttatttttgagatggagtttcactcttgtcgccaggttggagagcagtggcacgacctctactcactgcaacattcggttctcaggtttaagcaattctcctgcctcagcctcccaagtagctggaactacaggcacctgccaccacgcccagctgatttctgtatttttttgtagagttgggacttcaccattttagccaggctggtctcgaacttttgacctcaggtgatctgcctgcctcggcctcccaaagtgctaggattacaggcgtgagccatcgcgcccagccaaaatgcacaattttaaagagctctttggaaacagaaaatggcctgcaacaggcatctcttccacatcctatgtactttcttcaattgaccctaagccagttgagtgcctcctgaccccacaaatagatttcattcttcccattttacagatgcagaaactaaggcactgatgagttcagcaacttgcctaggtaatatatatggcccagccacactttagacccaatttctggctcttgttactttccccacatcattctcagtctttcttaggaatggacatttgcctgtttccaagaacagtatttctgtctccctatacaagtcactgataattttatgatgcccaagaggcaggtgataggaagtcatgcctgcagggagagagggctggggcccatgcggaggggaaagtcagaagaggctgttgcagctgaagtcggaggagaaaagtggatgtgagataaagcctctgtccctgtgccactgcccctgaatggggccctgttaaccccatctgcacaggcccacggctccggctttatgggttgctatggcaacccctggccttgacaactgaagtgcacttggctgagtgtgtctttgtgtccctttgagtctgcagagaagccagcagctggggctgcagacgggaaaggaatgtcctcagcgtctgccagcacttttgtcttggtcccaacggctgataggaaaatgagaggcagggtcttttctagagagatctggggggtccatttctagccgatgatgcatgcaaagagttcgtgttcacaggacctgggaagcagcggagtagaaaggtgagtcagacgccatcttcataggctgcttgttgagcatttactgtttattcaatgattgtttgcaggcaggcactgctctggggctggggaaacagtaaggacttctgccagcccacaaaatagttccaattgctattactcccattttacagatcaggaaactgaggcacagagacgttacttaatgtgcctgaggttatacggcgggtcagtgagaggccagggatgtctagtctgggggtaagatcattttgaaggatgcaagattggggagatgcagggaagaagcagtttcatatccagcacctcacactctgcctccacaggcttttttctccctgtatccatgggatgtttgacctccagttccagggatttgaggatcatgaagtcctgtggtcatatgcagggcccaccgtccactctttatggtaattaacagtagttctcagcctccgagcctccagagcttcccccggtgcccaggtcacacctgtgagactcagacctacttagtctgggtggggctttgacacaagtgtaagcttctggtgagcgagcgtcaggtgcagccaacgctagaaatttctggcttttgagctctaagaccttgaacaagccttttaggcttctgaaccggttttataacgccagccaatcctgcagattaccgaaaggatctatggaaggtctattgcatgtggtaggtgaacagtaagtaaataaatgggagctggtacttttactatgattattctttctccagagcaaattggaagagtttgtttccactttcacctgaattcctctcacttttactgatttaaacattgaactcggcctcttagctcatctcgcccctccccgcaatgcaccagacacacgaaggaagcagagagagctaatttgcattttaatcaaaagaaaaaggacgaggagaggtgggtgggactgaagagctcactatctggctagaccagggttttgacttgttttgactgagacacacagtaaggaatagaacttacttcaggcccactgcacagctgaaacaaaaattaccagcatttgctatgtaccctgacaattcctattctgtttgatttactgatggatttaaatttctctttcagttctgatcatgtcaaggaaaaggtccccatgtgatgccagcctgcctttaacacctgtctgctctctgccagtctctagggaaaggagggggccaggcctggggctatagccttgggcggtccactctgtccggcttttaattgaataacttgctttgattttattatgttcttttcctagttgccttcgtagcaaataaaacttgacgggggaagatagcaattaggtttttttatttgttatatttttctttgtagagacaggggtttcactatgttagccaggctagtctcaaacgcctggcctcagctgatccatctgcctcggcatcccaaaattctgggattacaggcatgagccaccacacctggccagaaggtagcaattggaaaggatcctaggaaaattacttttttaaattgaaaaagcaagttgatttcaagaaaaatgttaagtcaacacaagtcatatgagacataagagctcaaaggaagggtagtatgccaagaactgaggttcgggaaatgcatgggggagattgggggtctcagagaccaggagggccaacaaccagcctgctgtaacttcagattttcagatttctccaacctccttggtcacaatttcatggcgtgccagtgctctgaaagcacctcccttctaaccaggaatccttcacctgcttctttccccagatgcgcccatccagggtctagcggattgcaaagggcctggtagaatcaaagagggatatactaatgcaacttcgaggtaggagcaaggcttggggaaaatgctgtggcaaattctcagtaatatggaactcttagcacgcttgtcaggtgtttcttagagtccgaacgggccttagaaacaatgtgatccagccaggcaaggtggctcatgcctgtaattccagcactctgggaggccgagggatcacttgaggtcaggagttcaagaccagcctagccaacatggtgaaaccctgtctctacaaaacatacaaaaattagccaggtgtggtggcgtgcccctgtaatcccagctgctcaggaagctgaggcaggagaatcacttgaatccgggaggcagaggttacagtgagccaagatcacaccagtgcactccagcctgggtgacagagtaagatcgtgtctctcaaaaaaataaagagaggaagccgagaggctatttaggatatcattgccttcatccaggagaaggatgatggcaagttggaccagagcatgttggagacttgtgcaccagcagggatatactggaaccctgggcacccagctcccttctatcatcattggtgcttcaggcttctgtaccaagaaagagagccttcccttgtggcagcctgcatctggggtttccagtgcaagcctgcagggaaagtctgcctatctgtggggcctctttccttggcaactccagaaatctccagggatctcagaccatagggctctagaatcaatgactacatcttcagcagcaagtataagacaggagcaagtcagagacagagtaaatgcaaatgacttgtgtgcctatgattgtccaggatgtgttcatccattatccctaattcccagcgcaaccctgcagtgagagaggcatcactatctccaatctacaaatcaggaaactgaggctcagagcatttttgtaagtttcaccctgttgtacaagtacctaagatagggcagtggtttggatccaagctttttatatatatatatatatatttttttttttttttttttttttttttttttgagacggagtcttgctctgtcgcccaggctggagtgcagtggcatgatctaggctcactgcaacccccacctcccgggttcaagcaattatcctgtgtcagcctccccagtagctgggattacaggtgcacgccaccatgcatggctaatttttatatttttagtagagacaggatttcaccattttggccaggctggtcttgaactcctgacctcaggtgatccatccacctcagcctcccaaagtgctgggattccaagtgtgagccactgcgcccagccccaagctttatattctaaaacccaggctcaaataccacctccatgcacaacccacatatcttaattatctattatggtgcacataacagacatcactaatctatcacattttttcccctgaaaacctaaaagagtgcttcctgctaacaggtcaaaaaataatgaaaaataaaaaataagtaaagctaaaagaggccgtaaaatctttttgttcgctgctccaaataggcaatactcattggccagcactggcacgtgttgtaacatttatttgccatttcaatactgcacagaaaattagcttctctcagctaggcatggtggttcacacctgtaatcccagcactttgggaggccaaggtgggaggactgcttgagcccaggagttcaagatcagcctgggcaacatggtgaaaccccatctctccaaaaaagaaatacaaagattagccaggtgtggtggcatgtgcttatagtcccagctactcggtaggctgagatgggaggatcacttgagcctgggagccagaggttgctgagatggcaccactccactccagcttgggcaatagagccagaccttgtctcaggaaaaaaaaaaaaaacaaaaaaaaaaaaaaaaaaaaaaacaatggcaatcttggggtcacacagcctgtagcaggtggaaattgaagaataagtctgtgtgatcagagtgtgtcattactctacacacacttctttggtcctctcccttcccatctacaaaagacagccaactccaatatctcttttttcttttttttttttttgagatggagtctcactctgttgcccaggctggagtgcagtggcgccatctcggctcaccgcaacctccgcctcccgggtccaagcgattctcccgcctcagcctccaaagtagctgggattacaggcgcctgccaccacgcccggctaattttgtatttttagtaaagacggggtttctccatgttggtcgggctggtctcgaattcctgacctcaggtgatctacccgtctcggcctcccaaagtgctacgattataggcgtgagccagcgcgcctggctttttcatttttattaagataaacataacattaacctttttaagtgaaaactcagacccttttagaacatccacaatgctgtgcagccaccaccgctatctaattccagatttttttcatcaccccggagacccccgtacccattaagcagtcatctctcattcctcccaggcccctgccaacccctgatttattttctgtctttgtagattcacctactcttgaaggttcctataaatggattcgtagactatggggcattttacctctgcattcattcatatagcataaaaaatattttgagatttatccatgttgtagcatgtgtcagaacttcattcctttttatgactgaataatatttcgttgtaaggatagaccatgttttgtttattcattcatccactgatcgacatctgggctttttctacctttcggcgcttgtgaatagtgctgctatgtgtatttgtttgagtctctgttttcagttctttgggttgatgcaaaggtcatttccttttgcaccaacctagtacttaggggtggaattgctgggtcatgtagtagtaattctatgcttaactttttgaggaacttgtaattcttaaaaggccatgccaactctaggactgagggtttaagagctaatccctgccttcttactcctcatcaactcccaccccagtgggtgccctccaacacacctgcctcgagaaccccctccccagctcagtgaccccagcatctcattgacatgctgagtgcatgctccctgcccctccctgggagcctgcctaaacacagacccttctattctttctaattttttttgtacccattaactatccacctcccattcaacccgccactacccttcccagcctctggtaaccatccttctactctctatgcccgtgacttcaattgatttgatttttagatcccacaaataagtgagaacacatgccacttgtctttgtgtgcctggcttatttcacttaacatgatgatctccagttccatccacgttgttgcaaatgactagatcttttttttttttttttgagatggagtctcgatctgttgcccaggctggagtgcagtggcgccatctcggctcactgcaacctctgcctcccgggttcaagcgattctcctgcctcagcctccctagtaactgggactacaggcatgggtcaccacacccagatgatttttgttttttgtagagatggggtttagccatgttcgccaggctggcctcatgggatccacctgcctcagcctcccaaagtgctgggattacaggtgtgagccactgcgctgaatagtactccattgcgtgtatgaaccacattttctttatccattcatctgttattggacactcaggttgcttccaaatcttagctattgtaagcaatgctgcaacaaacataggagtgcagatatctcttcgatatactgagttccttccttttgtgtatttacccagcagtgggattcctggatcatatggtagctcaatttttagttttttgaggaacctccaactgttctccatagtggttgtactagtttacattcccactaacaatgtacaagggttccctttgctccacatcctctccagcatttgttattgcctgtcttttggatataagccatgttaactggggtgagatgacagctctttgtagttttgatttgccttctctgatgatcagtgatgtcaagcaccttttcatgtgcttgcttgccatttgtatgtcttcttttgagaaatatctattcaaatcttttgtccattttttgatcgaattatgagatttttttctatagagttgtttgacctcctttttatattctggttattaatcccttgtgagaggagtagtttgtaaatattttctcttgttctgtgggttgcctcttcgctttgttggttgtatcctttgctggaggacagacccttctggatgcaactagagcagctgggctccctcctccctttgagagggtctccagagggccctatcaatcaagatcagcctagaaattgttgctcgagttggctccagatgaccgcaccttcaccttccctccaagtgctctatgatttcttaccacacccactctcactgtgcaccaggatccttagctactccgtgtcatcatacacctccgagcacttgccttatccctgctttcttcattgccttctgaaatcgcctaacttttgaagatgcagctcaggcaacacctccctgacattgtcaccccagccagaaagaatctccccgtattcccttagcacttcactcacaccagcaaaatagttgtgattctgttctatcttatgcagaatttgttgttgacagtgaactggaaaatttttatgtacatatcatgctgagttattttaagaaagtattcacatgatgggtaaagcagcctagtacattaaattcttccattttctttccgctcatagttctctgccactaaattatgagcttcagaaagaaagcaatttatccatcttggtttctcctaagagaagtgatgacttggccaggagcggtggctcatgcctgtaatcccaaccgtttgggagtccaagatggtaggatcacttgagctcaagagtttgagaccagcctgggcaaaatagcaagacctcatctctactaaaaatttaaaaaaattagccaggcatgatggcacatgcctgtagtcccagctacttggacggctgagatgggaagattgctagagcccgggcgatagaggctgcagtgagccctgatcgccccactgcactccagcctgggcgacagagtgagaccctgtcagagagagagagagagagagattgattatatctaaacgatgcagtgccttgctgataacaggtgcctaattaacttgtgttgattgaattagtggatgagagggagtgaatgaatgacgttaactcttccaattgtttgaaatatattgtgctaagaattaatgtctaacagagatcagattttgttataaggtcaattttcaactgcaggccaccaaaatgtcaccacggtatattttccaatgtgacattttgtaattgaaaacgtgtgggattggctctcacttttgcagaatattcaaatgttgagttctctgagacattcggagtttcaaaaacgtgtttaatggaaattgaattgtgtgacgcctcagtgctccctgtttcagacaagtggttttaagggaaagacatgaactgcactttctacacagttactctgttgctaaattaataggcttgcattgagtcggatatcctggaatagaaaaaaaaaatccattgagttattaagaaaagagtttgggccatgcacagtggctcacacctgtaattccagcactttgggaggcagaggcgggtggatcacaaggtcaggagattgagaaccttctggccaacatggtaaaacctcatttctactaaaaatacacaaattagccaggtgtggtggcacatgcctataatcccagctactcgggaggctgaggcaggagaatcgcttgaaccagggagtcagaggttgcagtgagccgagatcacgccactgtactccagcctggcaacagaacaagactccatctcaaaaacaaagagtttggtttctcagttaattcatggccacactttccaagcccacactttctcagaaagtttcctctggtgaaaagcaataaaatttattctgtgaactacgtcatttttattcatgaagcctcatatcaacaatagctaggggccgggcacggtggctcacgcctgtaatctcagcacgttgggaggccaaggcaggcagattacttgagctcaggagttcaagaccatccttcacaacgtgagaaaaacctggctctactgaaaaaaaaaaaaattagctgggcgtggcggcgttcgcctgtagttccaggtacttgggaggtggcaggatggcctgaccctgggggaggcagaggttgcagtaagctaagattacaccactgctctccagcctgagtgacagagccagaccctgtctcaacaaaaacaaaaacagctaggagttttgttattagctggattaactgatgttacaatgcatagaggcaggggctttggggtcagacagtctcaggtaagcctatgactgaggccgaatgtcataacctctctgagcctcccttttatcatctctgaacagggagattaccctactcctatagatgtttgagcaaagagaagggagtaatgtacccttcagaatgtctcacaaagaccaggcaccatgcctcatgcctataatcccagcacttcaggagccaagatgggaggatcatttgagcacaggagtttgagaccagcctgggcaacacagcgagacccctgtctctaaaaaatatatatatttaaaaattagctgggtatggtggtgcatgcctgtagtcccagctacttggcagggctaaggtgggaggatctcttgagcccaggagttcaaggctgcagtgagcaatgatcacgccactgctctctagtctttcttttgtctagcccttttttgtcttaaaaaaaaaaaaaaaaaagaccctgtttgaatgctggatcatctcagtgggtagagagtgtcaggactctggcccagccctgtctagtcaaccatggccagtagggccaggtctatgcccccgcagaggaatggggaagtatctgagaagggggaggaaggaagtgcagagcagacaccccagaagatacttcctgcaccaaccccaccccacccgtgatagtacctcagttgcctgaagacaggataatgacctgtctctgtcttctaggagctgcctcctagggctctggggatgaaacgagatggttctacagcaccagctgagagcctgcacatagcaagtgcccagtacttgatgatgcttagagggtaaggacggcctctaattgatctttatgtgccctagtgcccagtgaagggtctggcacacggtaggtgtaccatgaatgttcgtagcacaaatgcatcaatggcaaccgcctccctccttcattcactctttccttctaataatacagccaacattctattagctctgtgggcagccacagcgtgctggaactcgccatcctgggctcggtgcctgattctccacactattcctgccctgtgctgctgagcccacgtgtttcccagcacctgaacctgtactctgaacccgcctgtcattcctccttgccctgttctctctccttggatacaggcctcccctccagctgtgggatctctctaggtctgtatttatcacctctggttggcacttcctatatgctgtcatcacagaagcagggggtgggagaagcctcttggtcttcatccaggtctaggatggaatttctgtccactgtggggctgggtagagttaggcagcccaagccagggctgcatgaggaaagggctgcgtccccagggtctgtcacagagtaagtttcaggtgttgcaactcgcaataaatccatgcattaggcacaagccaggactcctgagccagatatctctcaaccccaacgctggctccaccagcaacttgctgtgtcctgggtaaaccacatggcttcttttaaaaaaaatagttttactttgtttactgtccaaagtactcattaattgtttatttatcaagagaaactatttctaattttttgtgtgtgagacggtgtctcactctatcacccagactggagtgcggtggtgtgatcttggctcactgccatctccgcctcccaggttcaagcgattcttgtgcctcagactcctgagtagctgggattacaggcgtgcaccaccacacccagctaatttttgtatttttagtagagacagggttttactgtgttggccatgctgatctcgaactcctgacctcaagtgatccacctgccttggcctcccaaaattccgggattacaggagtgagccaccctgccagcccaaagagaaactatttcttagcccccatattcatgtttcatagttcaggaacacaggtcagtgataaacttctaggtaactcaacccaaagaaattctttatattccaaaatcactttgcactctgaacaataacagccatcctcatcgcttctacatatgccttgtttcttggttcagccacagcaaacttatagagagctgcaactctcagggatacaatgactgctccaacaatgtgaaatggcagactctggaccagaaggccacacacctgagttttgtcaaagcactggaagccgtggtagttgtctagttgtccttgataggtatgtcaacctcaacaccaatgtctttcctggatcacttttctttttttttttttaattgttattttaaaaatcacacagataacataaaatttaccatcttcaccattttcaagtatacagtacggtattataagcacttttgttgtatagtgaagctccagaactacttcatcctgcaaactgaaactccaaacacactaaacaatgtccttttttcccttcccccagccctcggcaacctctttttcctctttttctgtttctctttttttcctccttgaaacagagtctcgccctgtcgcccaggctggagtgcagtggtgcgatctcagctcactgtaacctctgcctcccgagttgaagtgattctcctgcctcagcctcccaagtagctgggattacaggagctcacaaccacgcccgggtaattttttatgtttggtagagacggggtttcactatgttggccaggctggtcttgaacacctgacctcaagtgatccacccatctcggcctcccaaagtgctgggattagaggcatgagtcaccatgcccagaccctctatctgtttctaggaggttgactactttaggttttttttgttttttttttttgtttgtttgtttttttaatttatttattttttattgataattcttgggtgtttctcacagagggggatttggcagggtcataggacaatagtggagggaaggtcggcagataaacaagtgaacaaaggtctctggttttcctaggcagaggaccctgcggccttccgcagtgtttgtgtccctgggtacttgagattagggagtggtgatgactcttaacgagcctgctgccttcaagcatctgtttaacaaagcacatcttgcaccgcccttaatccatttaaccctgagtggacacagcacatgtttcagagagcacggggttgggggtaaggtcacagatcaacaggatcccaaggcagaagaagttttcttagcacagaacaaaatgaaaagtctcccatgtctacttctttctacacagacacggcaaccatccgatttctcaatcttttccccacctttcccgcctttctattccacaaaaccgccattgtcatcctggcccgttctcaatgagctgtcgggcacacctcccagacggggtggtggccgggcagaggggctcctcacttcccagtaggggcggccgggcagaggcgcccctcacctcccggacggggcggctggccgggcagaggggctcctcacttcccagtaggggaggccgggcagaggcgcccctcacctccggacggggcggctggccgggcggggggctgacccccctacctccctcccggacggggcggctggccgggcggggggctgatgcccccacctccctcccggacggggcggctggcctggcagggggctgatccccccacctccctcccggatggggcggctggccgggcggggggctgacccccccacctccctcccggatggggcggctggccgggcggggggctgacccccccccacctccctcccggacggggtggctgccaggcggagacgctcctcacttcccagacggggcggctgccgggtggaggggctcctcacttctcagacggggcggccgggcagagacgctcctcacttcctagatgtgatggcggccgggaagaggtggtcctcacttcctaggtgggatggcggccgggcggagacgctcctcactttccagactgggcagccaggccgaggggctcctcacatcccagacgatgggcggccaggcagagacgctcctcacttcccagacggggtggcggccgggcagaggctgcaatctcggcactttgggaggccaaggcaggcggctgggaggtggaggttgtagcaagccgagatcacgccgctgcactccagcctgggcaccattgagcactgagtgaacgagactccgtctgtaatcccggcacctcgggaggccgaggctggcggatcacttgcggttaggggctggagaccggcctggccaacacagcgaaaccccgtctccaccaaaaccagtcaggcgtggcggcgtgaggctgcaatcgcaggcactcggcaggctgaggcaggagaatcaggcagggaggttgcagtgagccgagatggcagcagtacagtccagcttcggctcagcatgagagggagaccgtggaaagagagggagagggagagggagagggaactgaatcttaatctactttaggtttcatatgacaggaatcatgcagtatctgacctttggtgactggcttatttcacttagcataatgtcttccagtctcatccatgttgcagcatataacaggatttcctccttttttaaggctgcataatattccactctgtggatacagcatattttttcccattcatctgtcaatggacgtctaggttgcttccacctcttggctattgtgaataatgctacagtgaacatgggttaaaatacctcacttctggagcctcagtttcctcatctgtaaaatggggataatcacgcctgccccattgttgctggcacgtgaaagaagcctgataaatcatgctcctagcacctttcacttttccttcaaggcacttctccccattataatgatgcccttgtttatgttatgattcatttcattctctttgttcctcatgaagatgtaagctccaggcctgcctcattcatccctgtatgtccagtctgagaaacagtacttggtacaaagtcagcactcaatggagtacttgttgcaaaataaatagagggattttgttggagtgtttgggctaagtgttgcgtgactgtgaggtttgctgactctggggtcacacacatgtgagttcggctttcagatccaccacttaacctctctgtgcctcaatttcctcctctgtaaaaagaccatggagcatggttgtacatgttaataatagtaataaatattaatcatactgtatgtaaagcgttttgtgcagcatgcgtcacacagaaaggactcgggaaacagggtccatgaagaggaatgactcatgaatggtgctgtcgctgttctgagatacaaattttgttctgagatacaataccatttatgtaaaaaatacacataccaattaacaaaacaggtttttagcagaaagatgtacagacagaaggaggcacacaaaacacatttaaatggtgttctggggagagggaacagggagcaaggagagatgataaaaggaaacaaactgggggataggggctgctccaggctcccaataagaatggcaatcagggctggacacagtggttcatacctgtaatcccagcactttgggaggccaaggcaggcagattacttgaggtcagaagttcaagaccaaactagccaacatagtgaaaccccatctctacttaaaaaaaaaaatcactgggcatggtagcacatgcctgtagtcccagctactcaggaggctgaggttgcagtgaaccgagatcgagccactgcactccagcctgagcgatagaatgagactccatctcaaaaaaaaaaaaaaaaaaatgtgaattgaagtatatattcagtataatatagttttgggttggttttttttgttttgttttggtttggttttttttgagacagggtatcactttgtcacccaggctggagagcagtggcgcgattatggctcactgcagcctcaaattcctgggctcaagcgatcctaccacatcagcctcctgagtagctgggactataggcaggcaccaccacacccagctaatttttaaagtctttgtgaagatgggatcttgctatgctgcccagactagtctggaactcctggcctcaagaagtcctcggtctcccagtgtggctgagatgacaggtgtgagccaccttgcctggcctaatatataaagtccatgttcagtataaaacccaagcatttgacaatgtcagaagaactttctctattaggtgggaagtggtggggatgggatctttggctgagaggggagtggtcttcatgggcctaagtctgcatttctggtttctttcagggtggcagcacgcaaagggtgtccctgtccctcaaggggtcatggcctccatgttgctcgcccagcgcctggcctgcagcttccagcacagctaccgcctgctggtgcctggtaagccccgggggtcttgataagaactggtactaatggaagataccatccagactagggattcctgggctggaagagcccttggggataaagggaccagccagtgagtgtttctgggactgtcccactgtattagtctgttctcatgctgctaataaaggtacacctgagactgggtattttatgaagaaaaagaggtttaatggtctcacagtttcatatggctggggaggcctcacaatcatggcggaaggtgaaggaggaacaaaggcacgtcttacatggctacaggcaagagagcatgtgcaggggaactcccgtttgtaaaaacatcagatcgtgtgagacttactcaattgactatcatgagaacagcatgggaaagacccacccccatgattcaattacctcccactgggtccctcccatgacgtgggaattatgggagctatgatttaagatgagatttgaatgaggacacagccaaaccacatcacccactatccataaaactgtcaccatcgccacctcctttctctctcccatctctgtcatatgatcctgtcccaagtgcctcggtctgatgggattggatccaccctggagccactctgcctgcaggtaggcggtggcctccacagccagatggccccaggccatctctgcagggaccgctggggaaaacacacatctgggatcgctgctaaggaacaaagaaagccataagcgactctgaaattgacctagagcccagctgtgcttcagggtcactggatcactggatgggaggcaccatcttaggaatgtctcacccccactctgccccacacccatggccacttgcactggctccttcttccttctgtttgacgtctttgagacctccctcccaatagtcccatgagggagggaggctcaagtgaatcctattttacaggtgagagaactcaggcttagagaagcaaagccatttgcccaaggtcacacagccacttgcaagcaactctgtccggctccaatgctaactactcctccgtgtgcctccatgtggctctggagacagagccgccagcaggagcctcccttcacatgccccgagagtggcctcctgcagagatataaagtgcctggctcggggctggccatgaaataggttcagaaagaccagtgagcctccagcctgtccccagctctctcacagcccctgtgcttgtcatcatggtgtcccttgttggcaggccttactgccttctgaagacaaactgctagccgtgtccttggtctgcatgttgaatgctggtgtgtatgtcctgggtggcataaacagtaggagcgttcgcccctccccaaggagtatgagtaggctttattttaaaataaacatcttggccgggcgcagtggctcacaactgtaatcccagcactttgggaggcgaggtgggcagatcacctgaggtcaggggtcgagaccagcctggccaacatggtgaaaccccgtctctaccaaaaatacaaaaattagccaggtatggtggtggatgcctgtaatcccaactactcagcaggctgaggcaggagaatcgcttgaatccaggaggtagaggtggcagtgagctggatcgtgccactgtactccagcctgggcaacatcgaggctctgtctcaaaaaaataaaaaataaataaataaacatcttattttttaaaaattttagatttacagagaagttacaaagatattacagggagaacccatatggccctcaccagtttcctcccttgttaacatcttacatcaccaagatgcagttgtcaacactaagaaactagctggccaggcgcggtggctcacgcctataatgccagcactttgggaggccgaggcaggaggatcatctgaggtcagaagttcgagaccagcctgggcaacatggtgaaacctcatctctactaaaaatacaaaaaaaaaattagccgggtgtggtggcaggcacctgtaatcccagctacttgggaggctgaggcagaagaagcacttgaacccagaaggcggaggttgcagtaagctgagattgagccactgtacttcagcctgggcaacagactgagattaaaaaaaaaaaaaagaaaggaaaggaagaaaggaaggaaggaaggaaggaaggaaggaaggaaggaaggaggaaagaaagaaagaaagaaagaaaggaaagaaagaaagaaggacagacagacaagacagtggctcacagctgtaaccccagcaatttgggaggctgaggcaggaggatcgcttgagcccaggggtttgagaccagcctgggcaacatagggagaccctgtctctgtgaaaaatacaaaacttagctgggcatggtgacatgtgcttgtagtctcagctactggggaggctgaagcgggaggattgcttgagcctgggagatcgaggctgcagtgagccatgatcatgccacagcactccagcctgggtggccttgtcttaaaataataataatagataaataagtttttaaagacactaagaaactgaccttggtatgttaccattaaccaaactccagacttttatttggctttcactcatttttcctttaatgtctttttctgctccaggatccaatccaggtacacacattgcattgatttgtctcatcttccatggcctcctctggtctgtgacagtttctcagtcttttccttattcttctcgacctgggtggttttaagaagttatcaatggcttttgaggttttgcttttccttttttcttttttgtttttgtttttgtttttgtttttgttttttttttggtgtgtgtgtatgtgtgtctgagatggagtctcactctgttggccaggctggagtggtgccgtggtgcaatctcgactcactgcaacctccacctcccggattcaagtgatcctcctgcctcagcctcccaagtagctgggattacaggcacctgccaccatgcccggctaatttttatattttttgtagagacagggttttaccatgttggccaggctagtctccaactcctgacctcaagtgatccacccatcttggcctcccaaagtgttaggattactggcatgagccactgcacctggccaaggttttgctttatttatttatttataagagaagcatattaatgtttacccataattatgctaaactaaatcagaaagatgtaggtatggagggttccaagtcagaaagagagtctggcacagatgatccattcattccataactaaggctgttgggcacctactgcatgccaagtgctgtgctgggtattaaggatgtggcagtgaagaaagacatgtggctcttgtggagctctagcctggtggcgcatgtggcaccatctttaaaggtcattctccaggacatctgagctttcctaaggagacaccatgggaagagcactaggtcaagattcatgtgattggattgctaccttcaccacacattaaccaagtgagcctaaccgatataccttatccaagcctcggttttctcatcaggaaaacgggtctaataatcatatccttcctatttcacaaatttcttgcattagaagaaatggttcatatgggccaggcacagtggcccacacctgtaataccaacactttgggaggctgaggcgggtggatcacctgaggtcaggagttcaggaccagcctggccaacatgatgaaaccccgtctctactaaaaatacaaaaattagctgcgcatggtggtgtgcacctgtaatcccagctacttgggaggctgaggcaggagaatgggttagaacccaggaggcggaggttatggttcatgtgaaagcactttatttgtatttacagtaaggtgggaagtgtcctaactcccattttacaagcatggaaatacaggcacaatgcaaaaaacaaaaaaacagaaaaaatagaaatggctaaatcacagagtttcttacctttacctcttctgcattttcttggctggagctgaatcttttttggcacatttatgatttagaaaaccatatggtgagattttgtcttctcttttgacttattgatttgggatatctagtaagccagaatatggttttttaagaatactaaaacacagtgttggcaaagatacaggaatacgtgtactctcgtacactgctattaggcaagtagcaaccaggggaaggattaaaaaatgataggaattacagcttacttttaacccatttagccctcacctccactccttaaggtaaaggaaacttcaagtcagggaaattaagttgccagagccacagagctgatgagcggctgagccaggcttttgagctaagcccagttggctccaggacccgagccactgtattgattatctgccgccacgtaacacatacctccagatttagcagattgggatcctatgtttattatctcacagtttctgcgggttgggactccaggggtgacttagccagatcctctggctcaaggtctgtcatgagggtgtaatggagctgtcagctggggctgtggtctcatatgatggctcaacttggcggttggacgatctactggcagtcccacttacggggttgtggctggattcagttccttggatgctgtcagccagaagccactctcagttccttgatacgtggacctcttcacagagccgcttacaatgtggcaactgctccctcaaagcaagagagggtgccaaaaatggaagcctcagcctgcagccatacccacagcattttcctgcttctccatggtgtctccaccaggtccctgtgaggccattaaagtgacgatagttaacgatctgacatggtgttcccaatggcatcattttatgcctccccaaaattaataatcttatgttggtaaatagaatacagagagtgggagaccacatcaaaattgttattgctgggtagaaaattaaatgtgttttcttttttccatgttgcttattggtatcttcctcaataaacattttatcacaaaataagtggggtggacagttgcaggagcagataaaaaaaattttttaacagaaaagcagagcaaacaactccagttggacttgaccttcgttctggccaggctcatgtacagagctttggctgtttgggaacacgacattcgtttatcactctcggtctaaagatcaagagaacattaacaatgtttgctagctactgtgtagtttggagctaaaaatagactctggcttggcatggccattgagggctgtgagccccagagggccaggctggatggaccattcacatattgtgtctggtcttgtgtgtcaataacatactcttgccttctggatgtgttattttattcaagaatgaaaatgcttgatcattcagtattaattcaaaccggttttttgcatctttgtgatcatgatcaaaatttgcctttaggagaagtgtgttgttttgctgcaaatgtttcattcaaaggctagcactcgatgaaatcaaagatagcctcagttccattcatagcttctaggaaacaggtcagatgggcaaatttcctgctaaccacttgctagctgtgtgatcttgggcaaattaattaacctctctgagcctcagcgtcttcttctgtaatgtaagaataataacatttacctcataggagtttgtgagaattaaatgagataagccatgtaaattgctccagatgattcctggttgttaccctaagtgctcagtacacacttgaatctgcttctgtgtcttcatagatgagatccaagagaaggtttacttgtcccttcaatttttgttctgttctcttgtggtgtattgttatatgtcatcattaagagaatattcattgtaatagtatttggttattttccttttttaaaaatgccaacattgagatatagaaggaaaagcagaagtattgggattgcaagaacctgggttccaatgctgactcttcaactcactagctgtgtgacatcgggaaagtcacttaacatctctgatcctcaactgtaaactgtgaacaacaatactatctatatggttgtatttaattgtggattacttaaaatagatggaagtttgcctaaatagggccagcctagcattttagtaaagactgaatatgtgttaatttccccattccccccctttctgatagcgcagttgcaaacaaacttatggaaaacatgataggagctgatacagttctcggaacagacccatctgccttggacctgtcctcagcattcctggcttgtgccccatagcgcccagttagccagttctcaccctttcttcaccacctctcccagctcctgtttccccatggccttgacatgctcattatcgcagttccacttgatcccacgctctccagtcatttctctctggatccattcagccgcagctccccctgtgtactgctcccattcccagtatttccacactccggttcccaagaaatctgattgctacaatgcaatgtcaagacactttctggagaaaagaaaggaggacgcgtgtgtcctcatttaagaacagcttgctaatttctgatttttcattttccccctttgctggaaacaaagcaagatctgcactggtgaagagctatttttatcaaaatatgcgtccctgaagatctagttggaatcaatgctgtccagttatcctgagttctggcaaaggaaaagataaatagtttagtgtaaaaaactagggccgggtacggtggcttatgcctgtaatcccagcactttggggggccaaggcgggtggattgcctgagctcaggagttccagaccatcctgggaaacatggcaaaaccccttctctgccaaaaatgcaaaaaattagccgggcatggtgacgcatgcctgtgatcccagctactcagggggctaaggtgagaggattgcttgaaaccgggatgcagaggttgcaatgagctgagatcgcaccactgcattccggcttgggcgacagagtgagaccctgtctcaaaaaaaaaaaaaaaaaaaaagtagccgggcgcagtgttgtgtgcctgtagtcctagctacgtgggaggctgaggcaggaggatcacttgagcccaggagttcaacgccaggctgggcaacatagcgagacctcatttctttaaaaaaaaaaaaaaaaaaaagtcatcgatatgttctaggacctttagctctcttctaatggaatacttttaggaattccctttttcagatcaaagagaagaaaataaaagctgtttttcttcatccttatataagtatagtgctgtattttaacggtactttatgttcaaaagacagcatgatgttacataattaattcagaaaccttctttgataaccaaagcaattatggaaaattaagagtgattttaaatatgtttcaaaatctcatagctttgtatagttcgacaagctatctgcatgtgtgtctctgtgtgtgtgtgtgtgtgtgtgtgtgtgtgtgtgtcacgggagatcttggcacatttcttaacttctctgagctttagagtcccctcttgtgtaatggaaacagttatatatatatatatatatatacacacattttataatatattatataatatatattttagttataatgtattatataatatatattttagttatagtatataatatgtattttagttataatatattatgtaatatatactttagttttaatatataatatattttagttgtaatatataatatatattttagttatatgatatatattttagttataatatataatatatattttagttataatatgttatatattttagttataatatatattttagttatatatgtagttatataatatatatttttgtttattatatatatgaagatgaaattagattatttatgtaatttatataaagtgtccactgattccctagtttggtacaattatggcaaccccagtaagaggaactaacatttcccaaccaccaaatagtaccaggaaggtgaaagatcaagagtaacactgaagggatttctaggggttcctgacagtaaaccctcacacacttgtcttggatacaccgcacctgtctttcactcagggatcagcaaggcttgggcttgagctaccctttgtgtttcagcaacatgtggagctaaaaagattgtgggattcacccgggaaatcaaacaccctctgtaaactcattacacattatgtggaaaatgtgaaatgcattcaaacaaatgatgggtgaccatgtattagtctgttcccgcaatgctacaaaaaaaaatacctgggattgggtaatttttaaagaaaagaggtttaattggctcatggttctgcaggctttacaggaagcatgatgctggcatgtgctcagcttctggggaggcctcaggaaacttccaatcatggtggaaggcaaagggcaagcgaggtgcctcacatggtaggaataggagcaagagagcaagcagggaggagccacacatttttttttcttttgagatggagtctcgctttgttacccagtctgaagtgcagtggcacaatcttggctcactgcagcctctgcctcctgggttcaagcgattctcatgcctcagcctccctagtagctgggattacaggtgcctgccaccacacccggctagtttttatatttttgatagagacgggatttcgccatgttggccaggctggtcttgaactcctgacctcaggtgatccacctgcctgaacctcccaaagtgctgggattataggtatgagccacggtgcccagccagccacacacttttaaacaaccagacctcagccaggctaaaaatactaaaattagccgggtgtagtggtaggcacctgtaatcccagctacttgggaggccgaggcaggagaatcacttgaacctgggaagcagatgttgcagtgagcccagatcgtgtctctgcatgctaataccatgggcatctttccatatccacaaatatttaagatgtcaacctcaaaacaattaatgggtgcataatattccatgaaatggttgactatgccacattctgcttagctgacctccggtgctggacatgtaggttgttttccctttgttttttgtttgtttgttgagacagcgtctcactctgttgcccaggctgaagtgctgtaatcatggctcactgcagcctcaacctctcaggctgaagcaatcctcccacctcagcctcccaagtagctggaactaaaggcatgtaccaccacgcccagctaatttttgttttgtggtagagatggggtttcaccacgttgcccaagctggtcgtgaacttctgagctcaagggatccacccaccttcgactcccagagtgctgggattaccggaatgagcgaccccatctggccctctttgctgttaaatagacaatatatgatgaatattgtctacctccatctttgtgtactggtcccattattttcttaggatgaatcataaaaacgagattactcagttgaaagcaatagaaagctggcatcagatcaggcatggtggctcacacctgtaatcccagcactttgggaggtcaaggcaggtggattgcttgagcccaggagtttgaggccagcctgggcaacatggcgaaaccccgtctctactaaaaataccaaaattagccaggcatggtggtgcgtgcctgtaatcccaggtactcaggaggctgaggcagaaggatcaactgagcctttggaggtcaggggtgcagtgagccttgttggggccaatgcactccagcctgggcaatagagcaagactctgtctcaaaaaaaaatgaataaataaatacaaagaaagctggcatcagcttgtactcatgccagtaaaacaggagcatgcctatttgcctacaactttgctgacactgggttttcccttttttaaaatctacagtgtccttgtggtggcccagttggtctgtccagacacagtgttctggggtggtctggctgggatgaggctaaggtcctggcactacctctgttagggacattgggcatctgtcagggcagaatcctcatgatctctgctgtcaccagggatttctcattgtctttgtttactgcaggatccagacacattagtcaagctgcagccaaagtcgacgttgaatttgattatgatgggcctctgatgaagacggaagtcccagggcctagatctcaggtgagttgagcacacctgagtggggtattttggaaaagggaaaaaggcgcctaagaagcaaaagcacagccaagcttagggacctgtattgattgtcagctgctttcagagagttcaccaccagagatctgagatactcaatgaggccattttgccatacaaagccaaagaagggctgggcgcggtggctgacgctgtaatcccaacactttgagaggttgaggcgggcggatcacttgaggtcaggagttcaagaccagcctggccaacatactgaaaccctgtctgtactcaaaatacaaaaattagccaggagtgatggcggttgcctgtagtcccagctactcgggaggctgaggcaagggaatcacttgaatctgggaggcagaggttgcagtgagcctcctgagtagctgggattttaggcacgcaccaccacgcctggctaattttggtattttgagtagagacagggtttcactatgttggccaggctggtcttgaagtcctgacctcaagtgatccacccgcgtcaacctctcaaagtgttgggattacaggcgagatggtgcctctgcactccaacctgggcagcagagcaagactctgtctcaaaaaaaaaaaagaaaaagaagccaacgagggcatcacagaggagatgtatcagttttctcctaccacagtaatgcttcataacaaacagccacaaaaatcccactagcatagagcaagccaattgctcgtgcatttaaggttcattgggagttgggtagacagctctgttgagcagacagctctgttgggctcacctccatgcctgggggacagctggctgttggttgatctaggttaggcgtggcttgaatcactgcagtgatttggttctgctccatgtgtctgccatgctccagaaggctagatggggcttgtcctcatggcaatggcaaaggtgtacaaaagcaagaggagaacatggtatagttctgctgaggcctgggttccgcatgggtccgccatcactgctgcctccttctgctggccaaagccagtcatagcttgccttaagtccagagtcaagggctggggtacaacatccaaacaacagtgaaagaacatggcaatgttacatggcacagggctcagagatcaaatgcccacctttctaatgcaaatttattttttctttgcacattttgcatattttgtccataatgtcttttttttactgtcaaaacatacttcttttgtcattgcaactattttataaatccagaaatctttgtactaatataagtgattgtagttattttggatagtgttttgctaacaaaacgggagacattttaaatgcatgtttctattggggagatagattttaatctagtagtagtaaaattcttggaatactttttcatattcttgtcatgaatattatcctgtatttttattggaaatatataattttatgacactaactgctaacatctattttatattgaattacttttggaattgaaatctttgtaatatcaaagcggctagtttctaattccctgtttctgtataggataaagtacaagtggtttatggagtgtttggattataattataaatggttctttgatatgcaagttaatattttcagttatttatattcttaatgaagtgttaacaccttttttcccctaaataacagagaatctgtttttatggacactagataaacaccttcagcttaagattttcttgctaaatattttagtttattttatctttcaggtggctgaatttccagcctgtctatcgtactagtaatttaagcgtgtaatggaatagtttcctgccaactatttatatcaagtaattttaaagtaatatggttgactaataaaatatttagttattggcaaaagaaaaaaatgccaagacttgggaaaacatgaaagattttaagctattttggcaagagtgtggacttgctataatgcttttgttgttcttgcctgcaggagttaatgaaacagctgaatataattcaggtaagtgaggaggaggtaactttccttctgttgcttctttatcacaattgagctaaaagacagatgcttaatctgttctggctcttttttaaaaaaaatgtagttgacttttgttctaaacattttttctcatttcctttgtgatttcttctttgacccattagttacttacatgatgtttaatttctacgctttggtaaatttcccaaatttctttctgttattgatttctagtttcattccattatggttggaaacatatttttgtgatttcaatcctgttaaatttattgagcctttttttatggcctagcgtatggtctagcctggagaatattccatatgtacttgagaagaatctatattctgctgttgttgggcagagtgttctatagatgtttcttaggtctggttgcttttagaatattgttcaagtcttctatttccttgctaatcttctccctagttgtcctatccattatggagtgccagatgttgacatctccaactattattataaaattgtttttccctttgattctgtttttgtctgtgtattcagggctctgtttttgggtgcaaatatgtttataattgtcatatcttcttagtggattgaccctttataatattctctctttctctctagtaatatttttatagtctattttttctgatatgagtacaaccccttctagctttcttatggttgctgtgtgcatcagattcctttctccatctttttactttcaaactatttgtgttcttgaatctaaagtgtctcctgtaaacagcatcgagttggttctttttatccagtctgacaatctctgccttttgattggattgtttcatccattcacagttaatgttattattcatatggttgtgtttacagctgccatttattgttgttctctatatgtcttctgtcttttgttcttttgttcctctttttttttttttttagacggagttttgctcttattgcccaggctagagtgcagtggcgcaatctcggctcacagcaacctctgccttccggtttcaaacaattctcctgcctcagcctctcaagtcactgagattacaggcacccgcctccacacccagctaatttttttgtatttttagtagagatggggtttcaccacgttggtcaggctggtctcgaactgctgacctcgtgatccacctgcctcggcctcccaaagtgctggattacaggcgtgagccaccgcacccggccttttttttttttttttttttttttttttttgagatgaagtctcactctgtctcccaggctggtgtgcagtggcacaatctcggctcactgcaacatccgcctcctgggttcaagtgattctcctgcctcagcgtcccaagtagctgggattacaggtgcccgccactatgcccggctaatttttgtatttttagtagagacaagatttcaccatgttgaggctggtttcgaactcctcacctcaggtaatccacctgcctcagcttcccaaagtgctgggattacaggcgtgagccactgcacccagcccttttgttcctcttttaatgtttttgttttttatttgagatggagtctcactctgtcgccccaggttggagtgtagtggcacaatctaagttcactgcaacctccgcctcccgggtgcagtgattctcctgcctcagtcttctgagtagctgggatcacaggcgtgcaccaccacgcctggctaatttttgtattttttagtagatacagggtttcaccatgttgcccacgctggtcttgatctcctgacttcaaatgatccacctgcctcggcttcccaaagtactgggattacaggcatgaggcactgcactcagccctcttgtgatgttactcattttgcattaagtgagtactttgcagtgtaacatttttatttctttaatgattactacatattttagttttctttgagtttgctctaaggtttaccatacatatcttaacagaatcgacttcagatttgtatctctttttttgttctgatgtataaaacacatacagaaaaattcataaaaaataaaatcacagcttactgaactattataaagcaaaccacccatgcacttagccaaaacaagaaatacattgctggcacccacagatgcctctgtgtgtccacagatagtcacgatatggtgtacttcactgattcaagcttaatcctaaaagcccaagaatctagggagtggcagtgagcctgagttggtcttttctttctccaagaatgcagaggctgtgcattttttctgcaattacgaagagagccgaggcaattacctggttgatgtggacggcaaccgaatgctggatctttattcccagatctcctctgtccccataggtaagagctgggaaatcattccttggatataacctctgtttctgtctctcctagtcgtggctatccaggtattaggatgtggcttccagcaggcacatcccagagtgttgcctgacacttcacccaagggtaggaaaaaaataaataatgtgtaaagggtatattattagacatattatatgtcctctctcatctactccttccccaaattccacagggtaagtatgtattaatatccccattttgcagataggtaaacaaagcatagaaaggtttggtaccttgcgtaggaatcatagctagaatgcaaacccatctgtgtgaccacagtggcacccaggtaggtgtcttaggttgagtttcctcgaagaagagcctgaggtggggatttcctttttccctgcttttttttttttttttttttttccagacgaagtcttgttctgtcgaccaggcgggagtgaagtggcgtgatcttggctcactgcaacctctgcctcccgggttcaagtgattctcatgcctcagcctcccaagtagctgggattacaggcacacgccaccatgcctatctaatttttgcatttttagtagagacggggttttaccatgttggccagggtagtctagaactcctgaccgcaagtgatctgcctgcctcagcctcccacagtgctgggattacaggtgtgagccactatacccagcctaatttttttattttttgtagagatggtggtctcactatgcgctgcccaggctggtctcgaactcctggactcaagtgatcctcccaccttggcctcccaaagtgctaggatttcaggtgtgagccactgaacccagccagaggtagggattcttgggcaggttattgattgagggagagctctcaggagaaaggggaggaaaggaaacagcctggggcagggggaataagctaagaaggatgaggtcttagctagaactatccacagcctgaccccacttcgggctctggtgcatacaccacaccccagagttggtctcagactgaagcaaagggcctggctttttatgacccttcaccagccagtcatcgcccatcagctgcgagaggggagaactcgtataatctcctcggaaaagtggcttccatttgccaagggcgattttccaggcaaggaggcagctggagttattatcaatcaacacacacagcagctggaaaacggtgacctgcccagtaaaagtgacctcggtgggatgcccacagcgtctgcctccccagcctcgcctcccagccatatagagtgttcactcgctgtataaaagggcacacagacaggatggacagggctaaattggaaatgcaggtagctgctatttgcagcttggatggttaatgtttctttggctgatggattcctggctacattgagtagtccataggctgtgtctgatgaagcctgtcccttcacaggtaatgctggttcttctgctgcagaagagcccggggcatcctccgctccccatcagcacctccctttggaccctgctcagaagcctggagcctttccctgagacccagccttggctgtcccccctcctcttcttcccctgctcatttcctcacacctatttatttgccactaacatgagattagacagtaagcggatgactcattctttgggggaagtccatcattcaggaatgcctcagctatggaaggcattttggagacaagaatttaaaaaccccatctcccctttgtgtgggagtggaagggatgggctcttgagttgtcctgggttcaaatcctggctctactatatattagctgtgggactgtgacccacccccgaggactccctcagtctgaatgcccagctagccactgtgtgcatgaaggtcagggaatcagattagcagcatttgtttaaaaaactagaagtttggtcgggcacggtggagcacgctgataatcccagcactttgggaggccaagggaagaggattgtttgaggccaggagtttaagaccaatctgggcattatagtgagaaccaaccccaatctctacaaaagagttttaaaaattagctagtcatgctggtgcatgcctgtagtcccagctactctggaggctcagtcaggaggatctctggagcccaggagtttgaggctgcagtgggctatgatcactccactgcactccagcctgaggcaacagtgcaagaccctgtctcagtaaaaaacaaaaacagaaaaattctagaagttctaaaagttctctctctggccacctgtcctcccgtatctgtagtctttgaaaagatttttttaagttaatacttatagagaatttactatgcacttggcatattgccaagtgccttatacattatctcattaaatggctacagccaccttggagtagggtcttctaacatcacctccagttgactgatgggcccgagtctcaagagcttgcaggattttcctggcatacacagggagtccaaggctaagccaggctgtgcacaaacaactctctgcctcccaagcttattcttttttttttttttttttttagacggagtcttgctctgtcgcccaggctggagtgtagtggcatgatctcggctcactgcaagctctgcctcctgggttcaagcgattctcctgcctcagcttcccaagtagctgggactacaggtgcccaccatcatgcctggctacttttttttgtatttttagtagagacggggtttcaccgtgttagccaggatggtctcgatcttctgacctcgtgatccacccaccttggcctcccaaagtgctaggaatacaggcgtgagccaccgcgcctggccctcccaagcttatttctatggtagctgccttgcagacgcctgcccctgccctgccctgaaatgtgggggtcccacagcatagaaagcccaaggcaggatttccctgatcagagggaccagctccgctttcatctcttcttcagaagccagtaaggcacgccacatctgaggcttaatgaggtctacctggaacaggcttagctctccaaaggcagaaaagtcatgaacacacaggcagtggtgataaggaaccaggacttaaagacctttggccccgaaacagttggagaaacccagagtgttcctttcttgagtaaggtgtacttttcagtcttggggccagcgtgtgttggagtaggatgggggagtgccagggatgaatgttaaccaccttggtccccctccaaggctgtctcatccgtcttctcgaccagacagagtggaaccccaaggcatttcaaatcactttcacttttctattctattagcagaaagtctcccctgggtgatgccaggtctttaatacctgtctccactggctgatctcttactgtggaggagtgcgcggcccaggctcagaggcttgggcaggcaacagaaagattgttcctactgcattcaacctctggccacattgacataaagtctcctttcaaagcaaatgtatttggatggacacagtggctcacgcctgtaatcccacactttgggaagccaagacaggaaaatagcttgagctcaggagtttgagaccagcctagccaacatgttgaaaccctgtctataaaaaaaaaaaaaaaaaaaaaaaaaattagccgggcatggtggtgcatacctgtaatcccagctattcgggaggctgaagtgggaggattgcttaagctagggaggttgaggctgcagtgagccatgattacaccactgcactccagcctgggcaacagagtgagaccatgtctcaaacaaagaaaacaacaaaaagaaaaggttcaaggggtggattctgagattagccggtgactggtagaaggaagagggggtggtctggaaagtcctcaggcatggacagttatatccatgctactgcagcgattgcatgttcaaattcagcaggagttagtgtgaaccttgtggtggaaattcaggccatgatatcagcaagctcgttttgcacaaactccatttgaccatcttggtcccaacagatttcagctcgtttctccttgatctcataagcagagagagtttcagcattttcagcaagttgatttatttatttctttctttctttctttctttctttctttctttctttctttctttctttcttttttttttcttgaaaacggagtcccattctgttgcccaggctggagtgcagtggcacaatctcagctcactacaacctctgcccccctggttcaagcgattctcctgcctcagcctcccaagtagctgggattacaggcacctgccaccacgctgggctaatttttgtatttttagtagagatggggtttcaccatgttggccaagctggtatcaaactcctgagctgaagtgacccacctgcctcggcctcccaagtgagattcctttcttatctgctattcttcaaactcgagaatttctgttagttactggcttcttactctttggggcacagtttcagcttttcagcacgttctttctttcttttctctgctttcctgtaagcccaagaatatagtcgttgattcgtttttgtttttttttaactctctgaggcatggtgtcaagtcctggttggccccactggctgccatgggtgtactaaccctgaggtgggtctcctacgcctccctccctctggtcttctcgacagggaggtccaggtgcaaccacaaagtgtcccgggcctgtggagtggcatcaccatggacaggggactctgtgtaggaggcagaggtgggaatgagcattgtccaccatcactggccacagaggtgatgtggccacttcccagggcttcaagacacatgaaagtgaggatgcattcatcagggtgagagctgtgatttttagaaactcaagtcaaacaaatgaggtcggctgctgagttcttttctcagagagagaccctgctgccctgttgtgctccaaccttatgtgtaattatctcccagtactgactgggagatgacctgcagggcaggtgcattaataaccaggagatagacaatggcttgacttcaggccgggttcggtggctcacacctgtaatcctagcactttggaaggccgaggtgggtggatcacttgagggcaggagttcaagacgagcctcgccaacatggcaaaacctcatatctactaaaaatacaaaaaaattgtggctgggtacggtgactaccgcctgtaatcccagcactttgggaggccgaggtgggtggatcacgaggtcagcagattgagaccatcctgggtaacacgatgaaaccccgtctctactaaaaatacaaaaaattagccaggcgtggtgatgggcgcctgtaggcccagctactcgggaggctgaggcaggagaatggcgtgaacccaggaggcggagcttgcagtgagccgagattgctccacttcactccagcctgggcaacagagcgagactctctctcaaaaaaaaaacaaaattagccaggcatggtggcacacacctataaacccagctactccggaggctgaggcacgagacacgagaatcgcttgaacctgggaggcagaggtcacaacgagccacgattgtgccactgcactccagcctgggcaacaaggcaagactctgctgaaaagaagaggggaggggaaggaatgggagcttgacttgttaggggaggccaacatgcgatagaatggttaagaatgtctttcaaaaagccctagaagattacaacaatcttgcttgagtttaacataactacagagtaattcttattaattaacgtcaaacatttttattttaatttttttctttttttatttcttctttttaaaaaaaagggatacatgtgtagaacctgccggtttgttacataggtaaacgtgtgccatggtggtttactgcacctattgtctcgttattttaattttaatagagtggggaccagtgcctttcctaagcctaatccccatctcaattcctctctcagaagcaacctgcttcttctagagagatactcagtgcgtgcgtaagcatacacatatcctgtgtctctccttcttcacttagcagatctcagagattattctaactcagcacaaataaatctctctcacccttttctacagctgattcgttacattagaaggcttatttccctgacccactactgatggatgttaggttgctttcaagtcttgagatatgagagtgtcacaattaagatccatgctcatagatctttatacacactggtaggataaattcatagaagagcaattgctgaatccgagtgtgctaagccttgttgtgcaatgtcaggcccagtctggatggtaaatgctgtaggactctgggaataagcagatgtgtgaaggcaggatgaggcatgcgggtcacagattgcaggtggcatcactactcgctcagtctctgagcaaacatttgtcgagatttgactcagcccatgggcgctgggaaggaaggtgaggatcctatctgcaatccagcactagggcctgttgaaccacactccccagccagccccaggcttgaaattttcttgcatttatctccctttttatttatttatttatttaaatagagtctcactgtcacccaggctggagtgcagtggcgtgatctcaactcaatgcaacctccgcctcttgtgttcaagagattcttctgcctcagccccccgagtacctgggattacaggcacgtgctacctcgcccggctaatttttgtatttttagtagagacggggattcaccatgttggccaggctggtctggaactcctgacctcaagtgatccacccgccttggcctcccgaagtgctgggattacaggtgtgagccaccacacgtggcgcatttatctcaccttatgtttatgtagtccagtaggtctcaaatctgaacaagcatcagaatctcctagagaatttgttggatttctaggctgccccttgagagattctgagtcagggatgttaggtggggccccaggaatctctttttgtcaacaaaggataaaagaccctttggtttttaaagagagttggggggttggaaaggaagggagagggaaggagaggtgggaggggcatggggaacccttggatgcaatgaggtctctaacaatactctcctgccctcaggttacagccaccccgccctgctgaaactcatccaacagcctcaaaatgcggtaggtcttggggttacacagaagaaagacaaaatatgttcatggccattcacagaatcactgggcagactttggcaatagtcctttcattcattcattcattccataaatatgtattgagcccatactatgtgccaggtatgtggcatgccttgatgaatgaaaacgcagtgccgacattcccacggaggcagtcaattaaccacacacatgaatagagaattgcaacaatattaagtgctacagagtaaggtaggcagcgctttgtgggcataaaagaatgatgctaatagttaatgtttatggagagcataatttgtaccaaacactgtgttcagcactttatagcgacaatattgacaagtctgtgaagcaggtacttttgttatccccatttttcagatgcagaaactgaggcacagagtggttaagtatttgcccgaggtcacacagctagtggaggcgctgagaataaacccacaggagctgagctatttggggatggagagggtgggtgtcagggaggcttcccagggaaatgacttttcagctgagatctgaaggagaggaaggtctggcaggccacgagtcgggaggaatggtctcagcagagagaagagggcagcggcaagggcagcagtgtggctggagcagagagagtggggagggacccaaggaggactggagtagcagcagggcacagggttttcagacgccacctaggccaggggttcagaactctcacactgttgacatccgtagccagataattctgtgtggtggggggctgtcctgtgcattgagacattgagcagcatcccaggactctacccactaaatgccagtagcaactctctcctgaggttgtgataaccaaaaatgtctgcagacatggccagatgtcccctggtggatacggtaaccccacgtgagaacccctgcaatacatgacacctgtctctatccgaagagagatagagagccattgcacatttatactaaagaatatggccaggcacggtggctcacgcctgtaatcccagcactttgggaggctgaggcaggcagagcacttgagggaggtcaggagttcaagaccagcctggccagcatggtgaaaccccgtctctactaaaaatacaacagttagccaggtgtggtggtgtgagcctgtaatctcagctacttgggaggctgaggcaggagaattgcttgaacccaggaggtggaggttgcagtgagctgagatggtgccactgcactccagcttgggtgacagagggagactttatcccaaaaaataataataataataataataaataaaaagtacaacacccatgcaggcatgcatacagcctaaatgcaccactcaatgaatttcccatgtaaccaaagtttcacaactctttttgttattggaacatcccttaaggagcatttttagacattattttcctagttgttccctatcatgaaattgaaatagaaaaatacagtacatatggagtgtatctgtgtgttgtatttatgtccgtgctttacatggaacagagtaaaaaattttttttttttactcccactgagaatgcatgagttgtaatgaggaatcagaacatgcccccacccagttattattccttccaaccaaattaagtagacccctccccttacttttaacagattgctgtatttctccagttttgtttgcttgtttttttcttgagacagagtcttgctctgctgcccaggctagagtgcaggggtgcaatcatggctcactgcagcctcgacctcccaggctcaagtgatcctcccacctcagcctcctgagtagcagggactacaggtgcccaccaccatgcccagctcatttttggttttttgttggtttgtttgttgttttcttttgtttttggtagagatggggtttcaccatgttgcccaggctggtctcgaactcctgggctcaagtaatcctcctgcctcggtctcccaaagtcctgggattacaggcgtgagccaccacacccagttgtatttctccagttctttattgccatgtaaatggagttttgcagtgtgtatctttacctcgtctggcttatttcattcaaaattacgtctgggtgattcctcctggtgtgtgtaatcgcagactgtgtatcctcatggctttagagcgttcccctctgcggatatcctgcaatcctactgtccgtgggtatttgcatagctccagttcagggctcttatgaagaccactgctgtggacgttcacgtgtgtgtgttttgctgtacccatttatgtgtttctgttagatacgaagcttggagtagaactgctggccatgtacagctcctgcagatcctgccagacagttctccaaatcgatcgcaccaactccactcccacagccgggggagggttccagtcttgccacatcctcgccaacacggggtatcactggaagatttttctttgactcagagagtaacatacttatccacacatgacaaggaacttgatcccagaaagaaatctaagaaaggcagaaggaacaaagacccaatcctggtcagaaaaggggtccctagccctaaaacgtacttcactttaaataaacagagttggagctaataggaaagaaccacattttcttctgtctgaatgggtgtgccccgcctgggaggggccaggggacactcttgcctccgattagttgagaggtttaggagctgctgtatagggaactggtgtcctcctgaaggtgtctgatgaggcccactgaggccggaggctcccgaatgtgtttacatctaaagcctggctttgttttgaaatgttgtgcgaatcccagatgccttggcagttggtgctgaaaaaaaatgtgtcaacaaacacatcagacacatttgcagtgtcaaccgcctccagaggcagaagcgtcctcaacaacacacgacgtcaaggcccagagattccggctgcatgtggtggctcacgcctgtaatctcagcactctgggaggctgaggcagaaggatccctgaggccaagagttggagaccagcctgggcaacatatcgagaccctgtctctacgataactgtttttaaaaaattagccaggtgtggtggtgcatacctgtagtcccagctactcaggaggctgaggtgggaggatcgcttgagcccaggaagtcattgcagtgagccgtgatctcgccactgcactccagcctgggtgacagagcgagaccttgcctctgaaacaaaacaaaacaaaacaaaaacatatcccagaaaacaaaggcccagggattctgatttcagggacagtactaccctgtccctgccaggagcttcccccaccttccctatccccccatcacctttcacctctctctgccctctcacctcgtcagggactggtcctaaccctcacatctcccacttggctttctgccagcaacctctccccatcgatccctcccacctcccttctcaccccctccaaaccgtccaccaaactgtgccgcgtgtggaacccttccctggtacttactgccttccggctgtgtcccagtctcctccacctcaaatgctaagcccttggagggctgcctcccactttcttctttagccttattacttgacatttgctcattcattggttattgactgaatgcttccaatgtgccaagcactctttttggtgctgggatttgatggtgaatccacgttctccgtcccagtctgggttgggttgttctgcagaggaactgggtttgaggcctgatgaaaagagcaccctgacgcagtcttagagaggtggcagctgacctccacgggctaaaaggtttccagcaggacatgcccagggcagtaggccggggcaccactggctgacatcttgggtcttccgcatttttggctggagatgcactcaggtggtggcaatggtattctgcttgtacagggcaggttcctgccaggtcaccaaagtcccaagaaggggtttatcaacctttttgcacccaaaccaaaccaccctgaaactccaccataattacttcatgtgacttcctaaaaatgaaaccatgtcccttagatctaatatctggattccaattatgatttcttttttcttcttctttcttccttcttcttccttctccttctccttctccttcttctccttcttcttctttcttctttctctctctgtcacccaggctagagtggagtggctggatcatagttcattgcagcctcgaactcctggactcaaaagatcctcccacctcagcctcctaagtgactgggattataggcgtgagccactgtgcccgacctccagttactatttcttatgtcaccaggcccatctcattacattgccaacaagttatacaataatcatggacattgcatgtgcacagtcacattgcaatgaatgcacatagcacagcaggcctgaccaagtaagacacctgccatcctatgacctctgggtctttccctctgcataactcttcctttgagactgaactcctgcatcctctgtatgccatatcatctcactggcttcttacaagcacctagtgaagagtctccagtttggcagatgagaaacccaaagctcagagaggttaagtgagttgcccaaggttgcacagccacttaagccaaagccaattatcttcatgctgtaccctaagcctgttgagctgactgcaagggtttagaaagctatcctcatttgatcctgatacccaatgtcccagatatcttctgttcttaatgtcacgctttctcgagcaagaacatcacccccacgtcgttcctagacccagacggctgtcaagctgccagccagccctacccttctgggagccatttccctgctgctagtgagggccagcttgcttccaccctattctcatgatgtgatttcttaggagccccactaacaggtcagagccagaaggaaatgttccttaaagtcccctccaaggttgggcacagtggctcacacttgtaatcccagcactttgggaggctgaggcaggcagatcacttgagtccaagagttcaagaccagcctgggcaacatggcgaaaccctgtctctataaaaaaatacaaaaaattagctgggtgcggtggcatgtgcctgtagtcccagctacttggaaggctgaggtgggaggatcacttgagtctcggaggttgaggctgcagtaagctgatatcacgctactgcactccaacctgagagagcaagaccctgtaacaaaaaaaaaaaaaaaaaagcccttccaggcaagccaaggtctctgggttgtgccaagcatgagcattttcgggcagaggctacctggagtatctgacagagagtggcatctaaagtcagtaaacctagatccgagttgtggttctgccccttcttggctgtgtgacttggggcaagttgcttgacctctctggtcctcagttcccccaactctacaatgaggacaattaacttccctcactacttatcctagacccaactgagtgatcgtgaagcagaaaaagcaagaggtaggaatctgccagtttctagcagcacaagtcaagtcctaaagctactgggagaatcatctctgggaacccctctgcccttagggtgtcctatacagtgatgctggtttttggatttgcactgagtgcattacactgattttgcccaagacactctttctctactccaaaagtccctttttgtatttttagcagagaaaaggtttcaccatgttggccaggctggtctcgaactcctggcctcaagcaatccatccgcctcggcctcccaaaatgcagggattacaggcgtgaggcactgcactctgcctgttttttagccattctgatggttaaatatataaagaaagagactcacgggaagttgcaaaaaccagtacaaagagccccatgtacgcttcgctcagttttccccagcggcagtagcatcctatataacgccaatgcaatatggcaaccaggacactgacccttttttaaaacatccacagcaatcctagtggatttctctaaaggtttaaggaaaccggccatgccccacgctgacagaacgtcatcatcctgcaaccccatttggaggctatttgaacacaggggctatgaaaagcaccatttgtgggcagggagctgggtcaggcccccagaagtcaccatttgtctcttgcccttttgcagagcatgtttgtcaacagacccgccctcggaatcctgcctccggagaactttgtggagaagctccggcagtccttgctctcggtgagttctggagaagcaatcccattgtcttcagacgtggtactggcaggggaagggaaaagtggagacgccaacaatgaagaataaggtgttgctacagaaatctttctctctgagcttattcttccatgcagagtattttaaatttttcttttaaaggacagaagggattctttgtgtgcaggacaaaaggagctggggaaatgaatatgtgtcgcatgataggagccttgcatatgtcattcaatcctgcccccacttctcggttttagttactacaaacgattaaagccattgggagcctcaacgtcccgcctggaacgtgtaggtgtcttagacagtggcaggtgcatcaggagtgggcttttgccccccttctttcctctctgccagcctcagggcctccctgggcttctccgccacccctggaaaagcctgagcccaccctcccagtccgacaccttccaggacagccctggttctgtctgtccccggtacggcccctgcgaagattcagctccagccaggggaagcgggaggacaggagtcatgatgagcctgggctcacggctatttccctccccacaggtggctcccaaagggatgtcccagctcatcaccatggcctgcggctcctgctccaatgaaaacgccttaaagaccatcttcatgtggtaccgggtgaggtttggggcacacacacacacacacacacaggctccccagcacccagccacacgctcaccccttgtctgactgttcattccaatgggctggagtattagacatcagtaccagggttaaaatacagggagggccactgctggatggtactttgagacggcacagtggggtatggtgcagagggctgaggctttggcatcaaaactatgcaatgggggctgggcgcagtcgttcacacctgtaatcccaacactctgagaggcaaaggcgggcagatcacttgagcccaggagctcgagaccagcctgggcaacatgacgaaaccccatctctactaaaaaaaaattcaaaaattggccaggcatggtgacgcatgcctgtagtcccaactattctggaggctgaggtggaaggattgcttgagcctgggaggtcaaggctgcagtgagccatggttgtgccactgcatttcagcctgggtgacagagtaagaccctgtctcaaaaaaaaaaaaagaagaagaaaatgctccttaaattcccctccaaggttgggcacagtggctcacacttgtaatcccagcacttcgggaggctgaggcaggcagatcacttgagtccaagagttcaagaccagcctgggcaacatggtgaaaccccgtctctataaaatatacaaaaaattagctgggtgcggtggtgcctgcctgttgtcccagctacttggaaggctgaggtgggaggatcacttgagcctgggaggtcgaggctgcagttagctgatatcatgctactgcactccaacctgagagacacagcaagagcaaggagcaagaccctgtaaaaaaacaaaaacagaaacgaaaacaaaaacaaaaaaaacccttccaggcaagccaaggtctctgggttgtgcctctaggttattttatttaaatatttaaatttaaatttatttaaatattctaaattgcagagacagagtcccactttgttgcccagcatggtctcaaactcttggcctcaagcaatcctcctgtcttagccacccaaagtactaggattacagatttgagcccgcacatctggcctccattcttcctggcaaaacatgcaacgctctcagcagatcttaatccaacagatcttaatcgttgctgatggtgcttaatgcattatgtgtgttagtttcttttgttgcgagcacagttggtagcctcacgtttcagtacagacctgcaacaattaatacatgagatccactcctgagaaagcactttctacttgtctggactgaatatcggtttggttggaaagatgaagccccgactaccccagagcatctctgagattttgttctgttctattgtttcagagcaaggaaagagggcagaggggcttctcccaggaggagctggagacgtgcatgattaaccaggtgagtgcagctgggcttgcaccacgtacatctggggaagctgcacagcctctcccgggctgttgctggctggctggcactgtcctcaattaggaagggccaggccaggcgcggtggctcatgcctgtaatcccagcactttgggaggccaaggcaggcggatcacccaaggtcaggagttcaagaccagcctggctaatatggtgaaaccccatctctactaaaaagacaaaaattacccgggcatagtggcacatgcatgtaatcccagctacttgggaggctgaggcaggagaatcatttgaacccaggaggtggaggttgcagtgagccgagatcacaccactacactccagcctgggtgacagagtgagactcctctcaaaacaaacaaaaaaacaaaaacaaaaacaaaaggccggctgctgtggttcacgcctgtaatcccagcactttgggaggccgaggcgggtggatctcccgaggtcaggagttccagaccagcctggccaatatggcgaaaccctgtctctactaaaaatacaaaaattagccagatgtggtggcgggtacctgtaattccagctactcgggaggctgaggcaggagaatcgcttgaacccgacgggcgcggaggttgcagtaggccgagatctcaccactgcactccagcctggcgacagagcaagactccatctcaaaaacaaaacaaaacaaaaaaagtacaagagggtttctggaatctgtgggaggagttcttagggtttttcccagaggtctcagggaattggtgctcaaccagcctgagacaatgccaacctccttgagacttgggggcccccacagttccctctgaggcacctccagcagttctgcctgaatcagctggaaacatgtttggattcccttgctgggtgaagagtcagaaaacaatgcaaggagttgcagctgtgccatttgcttggggctggaaagggacagggcgtccatgcacccctcctgaacccaaggcgcagctgccatgggagagtgcccggagaggggctcccctcacccgctttctagcaccacagaccccttccaaaggcctgggggttttcctgcaaggtgcccagctcggccccttgccttggtcaccctgggatgcaggcgtgcacccatcagcacctgacccgcctgacacctgaggaggcctgagtagtagggagccaggggatggggaggaagttgaagagcctgtagaaaaggggctgaaaacccaggagtccccagcagctggaggtaggcgggcagtgggtactgcttggccacttacagctgccacaggaggaaaatgggtccaaacagtgcagcactggtgagaagccagaagttcaggtctctatgtgaaatttcttagttttaaattttgcaacttgttttgagacagagtctcgctcttgttgaccaggctggggtgcagtggcgcgaactcggctcactgcaacctctgtctcccgggttcaagcgattctcctgtctcagcctcccaagtagctaggattacaggcccccaccaccatgcctgtctaatttttgtatttttagtagagacggggtttcaccatgttggccaggctgatcccaaactcctgacctccgatgatccgcctgcctcagccttccaaagtgctgggattacaggtgtgagccaccacacccagcctaaaatttgtgacttaaaaaaaaaaaaatgtaagtatgtatgcaaataaaacgtgtgtcttggatatagaccccattggtcccatgggtaacttttgcctgagaaggattcctggttcttctgatagatttctgtgtccctctggacttgcaggggcaacaatacagttcccccatccttacaactatgactaatgactgatatttcttggttttaggcccctggctgccccgactacagcatcctctccttcatgggcgcgttccatgggaggaccatgggtaaggagggaccattgcgctcccaaggtggcgtttagaatagtaataataacggcaacaatagcggcggctgacattagcagtttacacatattgtcccactgattgcacacaatcccactgcagagtggggattattattcctgctttgcagatgggggaatcagtgttcaggaagaggaagaatttccaaggctattcagtgacagagccgggactggaactcttgactctgtcttcaaagcctgcgctgcatctgtgattaatcgcaatgcaaacacatacccacgcacgcatgccaattaagggttcgagagtcccccttcagcttccggatgagaactggggttcagtatcaaaacatctcatgtactccccaagtatatacacctcctatgcacccagaaaaattaaaaattaaacgataaaaagaactggggtttcacaggcaacaggcctccctgcccactgacagccttgcgctgaaatgtctatcatctcctttacaaagacggtactgcctgcttccccaagccaagcgtctgcttttctgttttgctgaactcaggttgcttagcgaccacgcactctaaagccattcacaagatcgacatcccttcctttgactggcccatcgcaccgttcccacggctgaaataccctctggaagagtttgtgaaagagaaccaacaggaggaggcccgctgtctggaagaggtaatgctcataccctgcggatcctccccaaccaccagtcctgttgctcttgccgccccaagacttggggagaagagaaacagatgaagggtttatctggggatctgtgcagtgctcccccagagggaagcagggacacagaggccttgcgtcccaaatgttctatgttgggagagttcgtgagacacactgtttctgtcacagcatccatcacccaactctgataccaatttctgtatcacttaagtttcttggaagacaagagtcaatgactctaaaataagagaaaacagatcagttgaaagaatatggggctgggcacggtggctccgcctgtaatcccagcactttgggaggctgagacgggaggatcacctgaggccaggagttcgagaccagcctggccaacatggtgaaaccccatctctactaaaaattagctgggtgtggtggcacatgcctgtaatcccagctactagggaggctgaggcacaagaatcccttggacccgggaggcagaggttgcaatgagccaagattgcaccactgcactccagcctgggtaacggagtgagactctgtccaaaaaaaaaaaaaaaaaaaaaagagagagagagaaagaaagaatatgggatatcccacaggaaaaaatggttccacaagatcctctaaaccactggttttgtcttctcctgagtcttggggctttgagttgctgtgggtcgggggatgctatgggagaggctgaggacaggcagcacccccctaccccccgtttccacgtcatctaacacagccctctttagatccactcagtatatgggggttccagggaagacattggaagtaatctgcagctggaaaaaaatatcactgtttgggtatagatttgaactcaaataaggctgctggtttttttcttaggcacatcatcattttcaatcagttcatatttattgagcacctactagatgtcaagcaaggtgctaggtgctgggtattcagtggtaaatagaaaagacaagataatggcatcaagtacagcactgtccaatagaaatataatgcaagccacatatgtaattatagcttttccagtagtcaccttttctttcatttttacaccctgcctggaaactgccaaggagtcacatttgctttgttttgttttgctttgtttttgagatggagtctagctctgttgcccaggctggagtgcagtggcgcgatctcagctcactgcaagctccgcctcctgggttcatgccattttcctgcctcagcttcctgagtagctgggactacaggcgcttgacaccacacccggctaattttttgtatttttaatagagacagggtttcaccgtgttagccaggatggtctcgatctcctgaccttgtgatccgcccgcctcggcctcccaaagtgctgggattacaggtgtgagccaccgcgccggccttcttttcttttgttttgtttgagacagggtctcactctgtcacccaggctggagtgcagtggtgcaatcacagctcactgcagtctcgacctctctgggctcaggtgatcctcccacctcagcttcttgagtagttggaactaaggcacatgacaccaccacacctggctaatttttgtattttttgcagaaacaggttttgccgtgttgcccaggttggtctcaaactcctgggcccaagtggtctgcccacttcggcttcccaaattgctgggattacaggtgtgagccaccgtgcgtggccaggagtcacgttttttaaaattacaaagaaataggtgaaattcattttcagagcattttattgaaccgaatatattcaaaatattatcacgtaaatgtgtaattagtatttttaaacaatgtgatttttatattcctttttaaaaattcctttattttaaaaattcatttatttaggtctaaacaaactaagatagtccttttcttcgtattcagtttttgaaacactgtgtgtattttacacttacagcacaatgctctaaaaacaaagaaaaaccgggcgcggtggctcatgcctgtaactgcgacactttgggaggttgaggcgggcagatcacctgaggtcaggagttcaagagcagcctgactaacatggagaaaccccatctctactaaaaatacaaaattagccgggcatggtggtgcatgcctgtaatcccagctactccagaggccgaagcaggagaatcacttgaacccgggaggtggtggttgcggtgagctgagattgcgctattgcactccagcctgggcaacaagagtaaaactccatctcaaaaaaaaaaaaaagaaaaccaagaaaagtatctcagagcttccttggggtgactggtggagaccaaggtcaaaatcatatcacccaaacagaggctttttcttaattgtacataataaagaaagctttcacttgttagtctatctaggtgtacggtttagggtttttctttcttttttttttttttttgagacagagtttcactctcttgcccaggctggggtgcagtggcacgatatctcggctcattgcaacttctacctcctgggttcaagcgattctcgtgcctcagccactggagtagctgggagtacaggcgtgagccaccatgcccaactaatttttgtatttttagtagagatggggtttcaccatggtagccaggctggtctggaactcctgacctcaggtgatctgctcgccttagcctcccaaagtgctaggattacaggtgtgagccaccatgcccagcctctttctttttaacaaagacaggatcttgctgtgttgcacaggctggagtgcagtggtgtggtcatagctcactgcgatctcacagtcctggttcaaggggtcctcccacctcagcctctcaagtagctgagactacaggcacgcagccaccatgcccagctaatttctaaatgttttgcagacatgaaccgcgctatgttgcacaggctggtctcaaactcctggcctcaaggtatcctcctgcctcagccacccaaagtgctgggattgcaggtgtgagccaccacacctggcccttagaacagttttttaaccgaggatatatctccgattctgccccaaaaggattctcacaccaatcatagcaataatactgtaagaataggaacaataataatcaataataatatagtcgtgctaatcgtaatagtagcagccaccactttatgtgtgccagactctgctgtattttctctctgtctctgtgtgtgtgtgtgtgtgtgtgtgtgtgtgtgtgtgtgtgtgtgtgtgtgtgaatgctctcacctttatttctctcaatatacccgtgatgtagctatttcccacataacaaggttaagtgacaggtgcatgttccatgtaaaacagaggcagaaccacagctaaaacatctggcccagcaatcaactcatagtgctatattttctcattcagtcctctccacgaccctggaaggtggattctgtcagtgtgcccatacaacacatcaggaaagtgaggcttctgaagctaaattacttgccccaatttattagtttgtatccacccaggtgctagcaccgatttcaagtaggatacattcccatccacacacatagcttctaacagaggcttcactggtcttaggaaatgcacacaaacacatttccaataaaattgcatggggctcatcgaaccccagattcccacccacggatactggtcacaagcctctgccatcggtggtcactttcccctttgggatccaggtggaggatctgattgtgaaatatcggaaaaagaagaagacggtggccgggatcatcgtggagcccatccagtccgagggtggagacaaccacgcatccgatgacttctttcggaagctgagagacatcgccaggaaggtcagtggacagggccgaggttggatggagccattgggttttctgggttgagttccccgagtaacgggccagcagcacctctgccttggagcttctgtcaatctccagacttgcagaggctgtctgtcagcatcaggggtggagaagttggggttggtgaaagaatggggattcttccctaaaactatacacacacacacacacacacacacacacacacacacacacacatatatatatatttttttttttgagacagagtctcactctgttacccaggctggagtgcagtggtgcaatctcagctcactgcaacccctacctcccaggttcaagtgattctcctacctcagcctcccgagtagctgggactacaggcacacgtcaccatacccaactaatttttgtatttctaacagagacgagatttcgccatgttggccaggctggtcttgaactcctgacctcaggtgatctgcacacctcagcctcccaaagtgctgggattacaggcctgagccaccacacttggccttaaaatctttttaaaaaacctttttggatacataatagttgcagtgcgtaatgatcaaatctgggtaattggatatccatcacctaaaatatttatcatctctttgtattgggaatattccaaatccactcctattttgaactatgcaataaattattaactaaaatcaccctattgtgctactggacactagatcttattcttctatctaactgtacttttgtatccattaaccaacccctatttatctccacctccccattagccttgccagcctctgataggcgtcattcgactctatttcttcataagggaagtgtttttagttcccacctgagtgagaacatgcaatatttgtgtatgtgtggcttatgtcacttaacataatgtcctgtagttccatccacgtcattgctaatgacataatttcattctttttatggctgaatagtatttctttgtgtatatgtaccatattttctttttctttttttttgagacagtctcactctgttgcccaggctggagtgcagtggcacgatcttggctcactgtaacctctgcctcctgggtccaagtgattctcctgcctcagtctcccaagtagctgagattacaggtgcacgacaccatgcccagctaatttttgtattttcagtagagacggggtttcgccatgttggccaggctgattggctcagactcctggccttgggtgatttgcccgcctcagcctcccaaagtgctggaattacaggtgagagccaccgcgccttgccgagtgtgtatatgtaccatatttactttatccattcatccatcgatggacagattgattctgtatctcggctattgtgaacagtgctgcaataaacatgggagtgcaggtatctctttgacacactgatttgctttctttatattgtgtgtttgttttaatgtcttgtgcatatataactggcaatcaaaccgataagttcacagataaaagttataagacgtgagttgacttaacacagatgctgagttagaaatagccttggtgacaagcagaacatggcagctgaagtttgagaagcacattcgaggcctcactgttggacacagctccctctgacgaggtcgagacccgagactgaagccagatgacataccgctctgtgttggtgcagggagtatttaatgttctgggtttttttggtccagcttagcagttttaggaaacactcagattcagctctggttggaactgctcagcttaagtgttttgattagttttttttgtgcacagctcaagaacatggggctggtttgctcttcagaaaacaagcacgatgtgtgtggacccagggtttggcagttagctggctatggagggcatgaatttctggcctcccacgggtgtttatttctccctcctctctcttctccggccagcatggctgcgccttcttggtggacgaggtccagaccggaggaggctgcacgggcaagttctgggcccatgagcactggggcctggatgacccagcagacgtgatgaccttcagcaagaagatgatgactgggggcttcttccacaaggaggagttcaggcctaatgctgtgagttggagccaaccttctctctacatccagggcagagaagggagcatcctcttctcctaactgttcctttctcaccatcgaggagctgggtgggcacttactgggtcgcaggttttctaagtcccagttcttatcaatgcaattagcagtggtgtgccctcccagctctctctgtaaggccaactctggaacagtccaccatcagccttttcctgttttctctctgtgtgcacacacaataatatcatcgacagctgccgcagcagactgagcatttgctatgtgcctagttctaagtatttctcatatacttttaatcctgagaacaatctaaccaagtagctgttatttttatcctcatttgactaatgaggaatcaggcacagagaggttaagtaatttgtcaaaggtcacacagcctgttaagtgacaaagccaggattccaacccagagcccatactcttacccactacactgtgtactgccatgtgtgcatacagatttacacacacacacacacacagccatcaggggccaacgtcctttcaccattcctacatgtagtttctaccctcaaggttgcctcatggtccaaaatggcttctgatgctccagccatcacatctcaattctaggcagtaggaaagaaaaagaagggaaggacaaagtggcccccttcttgtctttagcagcctttctagaaatctcacataatatgtctatttccaatacttgactaagacccagtcacatggccacttctagccataagggaggctgggaagggtgtttcagttagccgcatggccaccctaaatcattcatggaggggtaaagtggatgatctttgagggtcactgccagcaatccagtcccaactccatctgtaagtcacgtttgccttagacaaatcacttagcctcccagaacctcagcttcctcctgtataaaatgagggttataggagttaaggaactgactgtcttggtttcctgggactgagggatttcccagtgcatgggacgatttggtcctccccatagcagttcctacatgcagggctgctgttggaagaattcagcaagattgggtgtgttctcctgctagcctctggtagagaagaattcagcgagattgggtgtgttcccctgccagcctctggtagatgcccactagattagtttctctcctcttcaagagaggaggcggggcgcctggggtaagtgactcctgcagggtgtgcatgtgtgtgaagccttccaacacccgttcctcattccagccctaccggatcttcaacacctggctgggggacccgtccaagaacctgttgctggctgaggtcatcaacatcatcaagcgggaggacctgctaaataatgcagcccatgccgggaaggccctgctcacaggactgctggacctccaggtaacaccccctcccctgccccgcccccaccacccatggctccccgcagcagcctccggggcaacactggagctcttcggcatggtgttgtgcctgctgttccagcagttcgtaacgggctgtgctgctcctagccttgggggctttgcacatgctgtgtcctctgcaggggatgcctccctatccctccatcccattccaacccctattcctgaactcctggttttctttgttgttgttttttttaatttattttttatttttttaatattgagacatggtcaagctctgttagccagtccggccttgaactcctggcctcaaacgatccttccacctcagcctcccaaagtgctgggcagcgcctgccggcactggttatctttcttatttattttattttattttatttgtctatttattttttgagaccaagtcttgctttgtacccaggctggagtgcagtggcgcaatctcagctcaccgcaaccgctgcctcctgggttcaggagattctccggcctcagcctcccaagtagctgggattacgggcatgtgccgttatgccctactaatttttttgtattttgaatagagacagggtttcaccatgttggccaggctggtctcgaacccccgacctcaggtgatccgcttgcctcagcctcccaaagtgctgggatttcacgagcatgggccaccgtgcccggccctggttatcttttgacaccaatttcagacatcccccctttgagagtcccccaagcactccctctctcaccccctctagtgtgttcattattcccgcctttgtgcaacctgttgcatacttaccactcggcagcactgccctcccctgctggagctggattactctctaccctcaaggtttcgtcatgggccaaaatggctcctggagctccagccatcgcatctcaattccaggcaataggaaggaaaaagaagggaaggacagagtggcccccttcttgtctttagcagccttcccagaaatctcacataatacttctaacacttgattaagagctggtcacgtggtcactcctaaccgtaaggacgtgtggggatgtgtgtgtgtgagtgtggcaggcaggcctaaaggggtgtctaaatggaagagactttaatctaaaccatcccagggccacactctgtgggagagggaggggtgtgttcaaactgccagctccccagcaattgacaagtgcaaggaacatgctagagtaagtgctggaaggacttctgagcctcagtttccttatctgtgtagaccaaagtgagcccttcttcactggcaggggattcaagaatgtgcccactgccaggcacaggggctcatgcctgtaaccccagtacttagggaggcagaagcaggaggattgccttcagctcaactgagtttgagaccagcccgggcaacatggtgagaacccatactccacaaaaagaaacaaattgtgcacataagtgtctaacacggtgcccggctctgtcacccccagaataggaccatgtctccagtttctaccaatgagctgccgtgaaataagacttgctcccccaactcagcccccagtaccctgaaattatttggggttttccaagcccttgtttgctgtccttcatatggacagcagagagtaaggtgaaatcaaggtcctccagactaggcacctgcatttgtttccttgtctgctgtaaaaaatcaccacaaactgtgtgggttaaaacaagaatttattctctcacagtttggaggccagggtctgaaatcaaggtttcagcagagttggctccttctcgaggctctgggggagaatctgttccatgcccctctccaccttctcgtggctgccgggaatccttcatgttccttgacgtgtggaggcttcactctgcttctggcgtcacttggtgttctccccactgtgcctgtgtctgtctccagattgtcttcttcttataaagataccagtcattgagccgggcgctgtggctcacacctgtaatcccagcactttgggaggccaaggcaggtggatcacttgaggtcaggagttcgaaaccagcctggcctacattgtgaaaccagtttctactaaaactacaaaaaaaagttagccaggtgtgatggcaggtgcctgtaatcccaggtatttaggaggctgaagcacaagaatctttgaacctgggaggcagaggatgcagtgagccgagatagtgccactgcactccagccagggcaacagagtgagactccatctcaaaaaaaaaaaacaaaaaacaaaaaacagtcattgcattaggggccattctaatgcaggaagacttcattttaacctaactaattatttctgcgaagaccttatttccaaattaggtcctagtcataggttccaggtaaacatgaatttagggggcagtgggaggaaactattcaatccagtacagctcccagtctcaaagccctgagggaggacaggcatttcttcttccagaagaaccacctttctagaagagctgacgatggagatggctaacatctgtggagcatccaccaagtgcccagccccaggcttaggacttaacatgtgaaccttatcgtgctaaagtctcaccacggccccagtggggtcaacagcatttaaatccttcagtttatagcagggtaaacagaggcacttgagtggcccaaggttatacagtgagagggacagagctgggcttggttgttgttgctggtggtggtggtggtggtttttttcctccacacaacacacatgtgcacagctgggctttgaacccaggcctgaatgtccccagagctcttaaccccctggaggtcctgccagtccatgcagaggccgaggctggaccatgggaggcctttgacgaagcacagccattaagcccagctggtacacaggtgatgggctttgacgccagccttgtctcctcccactacaggcccggtacccccagttcatcagcagggtgagaggacgaggcaccttttgctccttcgatactcccgatgattccatacggaataagctcattttaattgccagaaacaaaggtaaggggtcaggagtggctgctgagtttcatgagcatccagtatctcctgctgtagctgccacatgttgctaggtactcagcaatattttgtgtggggggcaggtggtacacaggtctgaaaagagcctgaatgctctttctccaaagaagagaacattacaaatgggatttctttatccatttatttactcaacaagcgttcgctgaggaggtgagttgtaagtggacactggagacagttacagtgatgatgaagaccatcagagccccttccttcaggaagcatgcagtgtagcaggaaggcatggctttacacatggcatttcacaaccaatccattgcaattttaagtcctgggaaggagaaaacgcagctaagagagcagatagctgcagcagttggtgagggtaggaaatcagggcaggctcccttgaggaagtagcattttaccctaagtcttgacaaacagggattggctgggtgaagaaggtaaggaagagcattctgggcggagggaagggtgcatgcgatggcctgaggtgggatggagcttacagaggtggtaaaagggaaagaagggggcgtgaaggcgaacggttgggaggggatgaagctgggggaggagaggccaggcccgggtcgcatgggcctgcagatcaggcttagcactccagacttcatcctaggagctgtgggaagccactgaggacatgtgtggcaggggtaagggcagacgctgtggtgagatcagagcacgtactctatgtcaggcacattgtcagttcttcttgtgccatcttacagaatccttgcagcagcctcagaagggcagggataatcaacctccattttaaaaatgagaaaacgtggtctcaaaggcataaacaggccgggtgcagtagctcacgcctgtaatcccagcactttgggaggccgacgtgggcagatcagctgaagtcaggagttcgagaccagcctggccaacggggcaaaacctcatctctactgaaaatacaaaaattagctggccgtggtggcggcacctgtgatcccagctacttgggagactgaggcaggagaatggcttgaacctgggaggtggaggttgcagtgagtgagactgggttgccactgcaccccagcctgggtgacagcgcgagactccatctctaaaaaaaaaaaaaaaaaaggcataaacaacctcgacaaggaaaggacaccagctgtaactgtgaagtcaccctttaaaataagcagagcctgtccctcctccgtaatagctcagcacctcacacatgcttccgactcagcctgtgcttttgcaacttatttgcttacctattttcttttcccactcctccatgactttgtggaaggcaaggactttatctcaggatttctctatcaccagacctagcttggggcagcaaagcaggcactcaaaggagagagggagggaggaagggaaaaaggaagtgtggagggaaggaaaggaagaagagaatgatggaggagatgaatgaggggagagagaaaggaaatgaagactggatgggtgggtggtaggaaggaagcccgggcttccatgatggaggatgatggatggatggatggatggatggatgagcgttgccaacaggcatcactttccccccagctctcccagcatgtgactttgagaaaccacgctcctcacctacctcctgcctctttcaggtgtggtgttgggtggctgtggtgacaaatccattcgtttccgtcccacgctggtcttcagggatcaccacgctcacctgttcctcaatattttcagtgacatcttagcagacttcaagtaaagaagccatttccactacagtgagaaagcccggatcccaacagttgtcaaattgattagtttgcctaattcatgttttcacttaaaagtatcagaggtgaatgcacagtgaagggtgatttgtggggagggagcatttttggtggtcttgggggaggggaggggagggaagggctggtgttgattttcctccctgcagagccaatggtgcacattggtttaagcccagagatcctgcttgagccctggactcatcttgggaagggccatgggaggtcctggctagagttctgcccaaccttgaccaaccccagcaatttttccaaaagccagtcaagggcattacatttgttcctgggactggcagctgggcctcctgggtgccagtccatctcaagtgccatattctgtgatcacggatgttggctccccctcgccctatgcaagcaaacacactctcacctcctctcccagcctcccggagctctgagcacgccccacgcatggtgcaggagggactggacagatctgaggaaggccgtaaaatggggacaggaggattcagctcaggagtaagggaagaggtcctctggccccctgaagatgagaatcacccctctcagtgcacctggggatccccctaaactgtgaattctgccctggacagggctttgcccttggaggatccccaggtggccttacccgtgattcttactcggcatcctccattccccaaactccctcctccctgttaaatgtcaacctagacctggacctgggtgggaggaaactgtagcctgagtgtccacagggacacacgtgagccacagggctagaagcacaggcccgtcaccccaggaggaaaagcccagggtctggggcagcagagccatcgcatcatgtttcccagggcaacttgaggtctgacttttggctccctcgccctaagaggctcttcctctcttttgctcatccaccttcacaccacttgtgagctgacccccaggaacagcttggctgttccaccagagcagagggaatcattgctggactggatttcttctggagggaagcaccatgaattaaaggtgccagagctccatgcatggaaaagtggcctgttggttcaacgtggtttccttgtacttgatcctcctgaaatgagagattttcctgagatgactgagtatggagattaccaggcagatgataccgaaatgcttaaaggggctgtggctgaggctgtagcatctctgctggaggtgagacactctgggaactgatttgacctcgaatgctcctaaaagagaacttgatagcctgacagcagagaagtattatttggtggggagtctgagaaagcctggcttgtattatctgtccaaaaggaagcctcttcatctcccggtgccttggttgactattttggaaataggcatatcaaggttcctgattcagcactttgctcttttaataacaaatcgtccaaagatctcaaagtaagggtttttttttttagcttccactcttccgcagacttggtcatcgacctatttttgttgaagaatgaaaggcaatgacaagtttaacatatacaaattcgtgaattcttgttcattttgcattcctgcagtcagtgctaatccgtcgttcttaatcaggagttctgccaggtttaaggtcacctgcactcccagccaagtggtgatgtatgcctcccactctctgcaaggttttcctcatttttatattcatttattcatcattcattcattcacctaactttcattaaatagctgcaccatcccaggccctgtgcggagcatcgggaatacaaagatgagataaaacattgtccctgcccccgggggctcacatgccactggaaacaacagactcttaaactaacaattcaagcaggcgccaagtgctatgacagaggtgtgaataaaagcatcaggaaatcggatggagaaccaccattcacccaagggtcagaggaggtttcaaagaaaaggtgtcattggagcagtgttttgcagaatgagccagagttcaccaagcaggcaaggcaaggaagggtgttgcagagagggaacagcatatgcaaaggcgtatcagttcatggcatcacatctttcactggggaagccagtttccacaggcagcatcccaaggttcaataaggccttatttaacaagcaagcaaaatgcaaaccaaaccattattcatttattggcttaagtatgctttctcctgaaaactttagcattgggtgcaaatattcagtatggttctcggagtccaaagggttttaagccagggcacaaccagaaaagtggctctctttggtagggagaggggctccaatatttcgttctctccccatggggcactgacagagaaatgaaatagttttatctggaaaattccagagctattatttactccttaccaagggaagttacttcttgtaaaaacttttaagccatttatcaacaagttcttgttgactcagggcataatgagttcctgagacatgctcttttgggggctggggctttagctagaagaatttcaaggaaaagaattctcagcagagctcaagattgtagaaactcagcagaagctggtaaaaacatggggagcccggaggacaggctgctgtccagggcagaggccatgaagaagtgcttccgtggccgacagtctggaaatgaatccatcatacattagtgccatagagtttagtaaccgtccagcaagtgtcatcacttttacagaaaacaaggtccagtaatagcaagtcttagtacatcctcacttttattataaatgggtgttttttcataatttttactgacgctcagtaaccatgcaaaattgtgtatagcattaatgtatctacatacctacacctatctatatataagctcatggtagaaaaccatagctaagtagcatcgcagacttaagcgtacaaagtgatcttgttcacaagtaatctgttgacagtgccaataaatgataaaaaaaaaattaacatgtcacaatgtaacggatgaccatatgcacaattccatgaattaaatctgtttcctgtgttagtcagtattcttaaataaaatttataattgaaacatga

SEQ ID NO: 268 - DNA, 306590 bp, Homo sapiens
gcggccgctgcccgctttgcgccgctcctccctgcgcgagtagcgctggccccggcgtcgaggcggccatggcgacccggagcccgctccccacccaccccgcctgctccgccctcccctccgccccgcgccacctttgatggctcggacctcagccggccaccgccagccctgctcgcgcgcccgcgccgccgccgcccgcgggtattaatagccggcgccgccgcgccctcggccgccgggggcttgggagccgccgatcccggagcccgagccgggagagggagccgccgcagccgccggcgctgtggaggtaggaggcgcgcggtgaacaatgaccgcggcgggagggcgggggccggcggggtccgggccgcgggcggcaacttgtgcgagtccaggctcccgcagcgcacggccgcggctgcgggcgaaggtgggcgcgtggtccccgaggtcctgccctgcgcagtcgggcggcgggtcgggcccgggcagccccggccaccatcgcaggagctcgggggcctcggggctccgggctgccccctgcgcccctctcccctcacctccgccgacgtcgggctgcggggctccgcgccggtccccgctcgcctcccccgaccccggcgcccttcccccgtttccttccgtcctacccgcccgctgacagcgctggacgccgcttccggacctcgggccgcaatctcggcccctgaggccggttgcgggccggggaggtggccgctggcgcggatgccgccgggtgcccgccgctcgcccacgcgcggcgcgagggttcccggcgggtgacaaagaggaacacaccctctgcccaagttagatttgtgtctctctttactgtctgcctttatgcagggcaaagttttttttattttttattttttaaagcaaaggacagattgctttgcggcgagtatttccaaacaacttctgattgtggttttacgattcaagttccggaaactttagctgtgtgatccggctggaccccggagactctgtgtgtgtgtgtgtgtgtgtgtgttttatttgagggggggaaatacgaattccctgtaatgagtctggatctcgtttgtggcagctggaggccagcggctgttggggatcgagtagggttccccagaaaggagggagctgaggctcacaaagaagcgaggccctggtatctgatcagttcgtggagacgtgggagagcctgcttgtcatctggaacagtttagcagcctcggcctccctgtctctcccagccctggggagtaccggtggcctctggccgtttcattatattgttgttaaggctcttctccttgtcagtttaccaggtttgaccgcccagccctggtctctgcgtggaaacccccgggggcccctctccttccagtaggcaacatcttcagagccaaaccctggcctagcactggcttctgtttaatgtgctttgcacgtggtgacttgcggagcccatttcagaacatcctccagcattgtcttgcttttcttattcagtctgaacaaggagaggagaaagaaacatctttctggtcctgaaagctttagggagagttgccttaaaaattggcttcgttgttccggagactttaggagggccctgcttcatcctatctttggctttctccctccttccacagtgttctcgtagggggtttattctcagtctttcggatgggttggtctccaggatgtgacagtttctgacagtgtgcttcataagtgggtacagctagcacatggctcactttatattcctgcagcatcgttctgcagcaaggcatcaatattggagttactccaagcacaacgaagcgtttgtgtttttagaatgtctggctaatagatctgcttctgggtaaaataaatagaagcattattgggcaatggctgctttactgagggaattgttggtggagacagtgagtagatgccttcctagcccagcgcctcccagaatctcttacttgtttcttttatgtgaatgggaaactggaaaccctcggtgtggaggtggctgtgcctcctaggggcagattctatggtgcaccaccccgcccccgttacttggggtgtggtgtttcattgagaagttctgtcactgtgggaatccttttgaagcgtggtttctaatgccccctttcacattgatattctcttcctttaattgatacagggatggatttattccttgcttcataatagaatgttaactttactctgtagccagacttatcaaagaagatcttaaaataattatcctggacaagtttcttactgggttattgcattcacctcagaattatccagagtttacaaggaacctggaggaacgtttttgtttcacttttcgttaaagaaactgtccaagggggctgggcatggtggctcacacctgtaatcccagcactttgggagaccgaggcggatcacttgagatcaggatttcccagcctggctaatatggtgaaaccctgtctctactaaaaatacaaaaattagccaggggtggtagcaggtgcctgtaatcccagctgctcagaggctaagccaggagaatcgcctgaacccaggaggcggaggttgtagtgagttgagattgggccactgcactccagcctgggcaacagagtgagactctgtctcaaaaaaaaaaaaaaaaaagagaaaaaaggaactgcccaaggaaattgttttgttttgttttttggttaaagatacaaataagatagcattgaaagggttagttttttttaaacagtgaagcttatactcatttaatttattgaacacctaagagcttaattcatttggaaaattgtatatatttatgaggaggatgcttgtgataaacatcagaaaaaaacaactcttttcatcctggacgggattagagaatactagagaaaggataaaaggctggtttctgcaggcagaatatgcttaggaaaaatggcattgtgattttcccagaggataagagaaattctgtggatttgtaagtactgtacttgcctgatttttttttttgagatggagttttgctcttgtttcccaggctggagtgcaatggcgcaatctcggctcactgaaacctctgcctcccaggttcaagcgattctcctgcctcagcctccccagtagctgggattacaggcatttgccgccatgcccaactaattttctgtttttagtagagacggggtttctccatgttggtcaggctggtcttgaactcctgacctcaggtgatttgcccgcttcggcctctcaaagtgctgggattacaggcgtgagtcacagagcctggccttgcctgatgttttgatagcatggtggactggacattttaaagaagccctttgtaactggccttgcttattgcagataactgcttagtgtttttgagaaatgcactttcctcaccagctgaaggtgctacagataagaggggcaggtatagtcctgtaatgcaggtgctaaagtctttctactttggaaggacaggcattccctgtattggttaccgtttgcctgggaagggaggctgtggggttttaggctctcgtggcagtctctctcctgttgtttggtgcttttgattgaaaggagcctctccaagcctggctattgaatgggaagcagcggatcaacttcttttcttgtcttttagtgtcagagtttattctgtggtggtactgggtcacagtcctttctctctgtttcacccatggcaacttaggtaggctgttacctccttaaccacttccacatggccaggaagatcagagccaaacggttttcattcaaattacttgaaatactgatttctccagtcctgttctgccaaatgcagcctttgttttcaatcaagaagcccccagaaaacgtgtatttaaaactggcaaaactttttataggatgcccttgccctggtttgaattagttaaaaatgtttggccaagtggatactttgagcaaaagtggataatggatacattactaaaatatcatgctcgaagcttttgatactaatccggcgagactgaaactgaggcatgctcagtgctgcctgcaaactgttaactcagattttaagttttcttagtttaatgtgggatggaaattatgaacttcaagacttgcaattaatgtgggaattcatcatttacactgaatgaatttcatatgtaaaactgtcatatttgttcacacattaaaaaaaagaagagcctcaggccacactagactgcctttaactctcaattatgataataacctctgaccacaagagtaacttcactttatgtgcagacttttgacgaaatgctttgcataaatttattatcaattagaagacttaaaaatccagtattatgatgactttcagtttttgttcttgttcattcaggatctagtatagtatctgaatatagcaaacccttggtaaattattgtgttctgttttctttttgaaaaaaactcgaggctggagtgcagtggtgatcatggctcattgcagccttgacctcttgggctcaagcaatcctttcatctcagtctcccgagtagctgtgactacagacacatgccatcacgcccagctaattttttctttaaaaaaatttttcttagagagtctcaccgctatgttgcccagtctggtaaatccttgttgaatgaataataaatccagtttttaccatcccttcaaattagtctttagggtttttaaaggaaacttgttattagaattgatagattgcagttctggcagtttgatatttgattttgttttcatttcattctaatttagcaattgaatccttaaagctaagtcagattgtaaaaagacagaggttccttttcaaaaaaaaagacaataaggtgcggtggctcacgcctgtaaccccagcacttagggaggccaaggcgggcgaatcatctgaggtcaggagttcaagaccagcctgaccaacatggagaaaccccgtctctactaaaaatacaaaattagccaggcgtggtggcgcgtgactgtaatcccagctactcgggaggctgaggcaggagaatcgctggaacccgggaggcggaggttgtggtgagctgagattacgccattgtactccagcctgggcaacaaaagtgaaactccgtttcaagaaaacacaagacaataaaagcatgaagaagaaaataaaacaaacttgaaatcctgccacctgttactgactcctaccttagcattttgggatctgttcttttatatagccttctcatttcttaacctgcgccaaatttgacattctaattgttttatatggtacttgtctgtaaatttaatgtgctcaccattcctttttgtactttgaagcttgcttctgggatacattttccttcttcctgagacacatcttctagaaattctgttagcatctgttggtggtaacttcagtttctgcatgtcttagatacctttgttcttgaatggtaagtttatctgggtgtgcaattctgtattgttcctgtattaatcagctgtgttctggtcccattgctgttgctgtctaattatttgtaactagtctgccttttctctctggctacttttaagatgctttggtgttctgcagtctggctatgacatgtctaggtatttcttctctcttttacttttttttttttgagtcaggttctcactcccattgcccaggctggagtgcggtggcatgatctcggctcactgcagcctcaacttcctgggctcaagtgatcctctcacgtcggcctcccaagtagctggaactacaggcaagcaccaccacacttggctcattttttgtatttttactagagatggggttttgccatgttgcccaggctagtcttgaactgctgggctcaagtgatcctcctgcctcggcctcccaaagtgctgggattactggcatgaactgccatgcctggctctcctttagttttattcctctctctcttcttccctcttctcctctccctctcttctgttcctcttccctgctcccttgctactgtctttcccatcctctttattagtttattttctgttgctcagcagtatttccgtggctggatatgctatgacttgcgtatccactcccctttggccattcaagttgttttcagtgttggctatcatgaatacagctgctgtgaacatttgtgaacaaatctttgtgtagagataggtttttatttttcctcctgggtctttaagtgtgtgcctaactttataataagctatttgtaagaaagcgttggcaccattttatgttaccatcagtgatgtatgagacttctagttactccaatcttgatcaacacttgaaacagtctttccttttagccattccagtggctatgtagtgatatctcactgtggttttgtttttcctgataactaatgaaacattttcatgtacttattgaccatttatatatcttcttttgtgagtgtctgttagatatttacttttttttttttttttttttttttttgagacggagtcttactctgttgcccaggctggagtgcagtggcgcaatcttggctcactgcaagctgtgcctcccaggttcacaccattctcctgcctcagcctcccgagtagctgggtctacaggcacccgccaccatgcccggctaattttttgtatttttagtagagacagggtttcaccatgttagccaggatggtctcgatctcctgaccttgtgatccgcctgcctaggcctcccaaagtgctgggattacagtcttgagccaccgcgcccggccaaatatttactttttttttgagacggagtctcactctgtcacccagactggagttgcagtgacacaatcttggcgcactgcaacctctgcctcccaggttcaagtgattcttctgcctcagcctcccgagtagctgagattacaggcatgcgccatgctattttttgtatttttggtagagatggggtttcaccatgttggccaagctggtctcaaactcctgacctcaactgatccacctgcctcggcttcccaaagtgctgggattacaggcttgagtcactgcgtccggcagatctttactgtttttaatttttttgttcagattgttttatatagctttatttaggatacttgatatacagtaaactgcacattcttaatgtcatcttatagttgtaggagttctttatatattttgtgtataaatcctttgtaaagatctacatagtatgaatattttcacccaacctatttttgccttttcattttttaagtatcttttgaaaggcaaaagttattaggaaaacattttacatggtctagttattgaacttatttaacgtcaggaaatatattcagtgttggaagaatagcacatttcttgtctgtaaggcaagagaaaaggagcatattgctcctttcaagagatcaggctccatttactggatggcgatggaacacttttgttcttacctaactaaaactgagttggaaaaaacctatagaggaagaaaaaaattgcctgcttaatttgaaaatataagcaaaaaagtgtttaagattatgatcaaataaatagatttaaagtcccaaactgagttgtgtttgttctttggcacacagaaggattatgggaaaaaatgtttttgaaatgaatgaaaaatgggtgccttgggcaaaagcaagttgtaacattctaaaaagaggttagtgtggcagatacacagctctgcagtcttgctttctgcagtttcagttacccacggtcaaccacagtctgaataaacaattcacaggtcttaaacggtgtgctgttacgagtagcttgatgaaatctcttagcgtcccactctgtcccttcttcattatgagaaggtgagtacagtgcattaagatattttgagagatcacattcacataacttttattacagtgtattgtccctccgttttattactggttattgttaatctcactgtgcctaatgcatacattcaagtttaccacaggtatgtaagtacaggagaacacagagtgtatgtagggttcagcgccatctgcggtttttaggcatccactgggggtcttggaatgtaaaccatctggagagggggacattagtttctctgttttggtagtaattgtatctttttatcggtgtattctccttagtttctgggccaaagagcaagtattgtaaggtcaagaaggatgtttctctaatttttggttttcttgcccacagaagatcaatgataaacattggttgatttgaactgaaatttgtgaaatatacactctctatgacattttagagtaaggaaggcacaggatatcaaaggtgacaatttggagtatagttgttgaagcgagacaaacctgcccttatatatcttccatctttttttttttttttttttgagacggagtcttgctgtgtcacccaggctggagtgcagtggcatgatcttggttcactgcaacctccgcctcccgggttcaagcaattctcctgcctcagcatcccaagtagctgagattacaggtgcacgccaccacgcccggctaatttttgtatttttagtagagagggggtttcatcatgttggctaggttagtctcaaactcctgacttcaggtgatctgtccacctcggcctcccaaagtgctgggattacaggtgtgagccaccacgcctggccatatcttccatctttgacattggacaagttatcaatgctctttcccgaaaacctcaaggggacatttaagagtacatgtatctgcaagtggcagaatgtctgactaatagcagtttcagccatcaaatactgagttgcttcaagtaataaaggggctcccagttcatgtctcagcccaaaatatcatcaaggacacagatgcattctgtccttctctgctgcccctcggcatgttgatttttgcacttgggcttgttggccatggttaattagactgctgcagcctaattagtcattatgcctaatggcagttgcagctccaagcttcatactctcacacatttgttgttactaggtccctagcagcacaggcttctcatttagcaaaaattttcccagaaggctccagcatctgggaggtctttgaagaggattctggggaatgtttgtgtgcacttaaaaggagacccaaagactagatgtgatgcctggaatcacagcagccatgtttttactagacctgaagcaggcaagagggtgacagagctgaaagtggaaccagagtccataaatgcatcattgagtcatttagatcttgcgcacctggagcttagcatgccaaatactaatctgttctaggataccagataatatgtgaattcactttctcgtcgtacttgagttggggttttcggttattgccatctaaagcatcatgactgatatattaattgggagattttatctttcatctgctatttaatattatctatgagaaaactgatttctacctgttaattatgtggaaagtgacttaaagtcatatcaaatcactgttagagatgatctctttataaggactttagatgtttgataatgtgtgcaagtcgtgcaactgagtctacatgaatttcgcgtccttttaagctggccttgcagggcatctgcttggaatctaccatctggcagtttgggttacagaacatacttgagagtattgcttcatttcttcaagaaaaaaatgatggaaatgccagccatttctgtcaacctagaatatcatctatctgcacatttaatattgttaggaactttgtgaggaacttattaatcaggggtttgtgatcttcctttgtaatcttaactggagtgtttggttctctaacatcaggtgctagcaggggccaagatggatccaagtggagtgagctgtttggaaatatcaggatatggggaaaccagcgattttctaaatgagacaaacatgttagtgaatctgtgaagaaaagttaagtgatgtaataataacctttatatatatataaaatatatataaatatatttatatataaaatatataaataatataatatataaaataatatatataaaaatatataaaatatgttatatataaatatataataaataatacattatatataaatatgtataatatgtaacacattatatataaatatgtataatatataatacattatatataaatatgtataatatataatacattatataaaaatatgtataaatatatatttatatatatattatatataaatatgtataaatatatatttatatatattatatatatatttcgagatagactcttgctttgttgctcaggctggagtgcagtggtgcaaccttggcttgctgcaacctccgactcccgggttcaagtgattctcctgcctcagcctctcgagtagctgggattacaggtgcctgtcaccacacctggtgaatttttgtatttttagtagagacgggctttcatcatgttggccaggctggtttcaactcctgaccttaggtgatccgcctgcctcagcctcccaaagtgctgggattacagatgcgagccaccatgcctgtccttttttgagttttaatgcatagatttgtgtaaccaactccacagtcaggatatgggacatttctgtcaatttagaacattcccttgtgctgcacccccagtccctgttaaccacctgtctttgctctgtcactaactatagtctggtcttttccagtatgtcatataaatggaatcttagcatttgtaaccttttgagactggcctctttcattcagcctaatgtctttgtgattccaacagctcactcacttttgctatctagttagtattccatcatatggatgtaccacagtgtgtttatccatttacttattgaagaacagttgacttgtgtccagtttggagcaattatgaatagagctgctataaactctcacatacagattttgatatggatgaagtttgatttctcatggacaaatagctagaagtgaaatccttgtcagcacttggtatcgtattttttattttagccattttaacaggtgtgtagtggtatctcatcatggttatatatttttttaaccaaaaaaatatagagaaaaacatctttaagaagggcttacctgaagatgtgactaaataatttcttggactctctggcagagaaagactggaggagctttgttggctgcctgcgttttgaaggagtggattggaaagagcaatttgtgtgtaaaatctcgaggcccagaatggaacagcgccagcgggaataaataagatgtcagtcctgtaggtgattatctcaaagacctgatggggcatgtaggtttaattccagtaactattttgttaattctctatgtgaatatacagggataatcattcaaaaataaaattaccgaagcaactgcaaggccctgtggaggtggagaaaagaatgcaggcattagggcatgccttcattatctatggccgcatgacacattacccccaaagctgagtggcttgaaacaacggtaaacattgattatcttttgcagtttctgtgggtgaggactttggaaatggcttcaatgaacaattctggcatggaggtttgtgatgaagatgtcagctaggagctgggcatggtggcacatacctgtagtctcagctacttaggaggctgaaggtagaggatcgcttgagcccaggagttcccagcctcagcagcatagcaagaccccatctctattttttgaaaaagtcaactggggccgggcgtggtggctcacgcctgtaatcccagcactttgggaggccaaggtgggcagatcacctgaggttgggagttcgagaccagcctgaccaacatggagaaacaccatctctactaaaaatacaaaattatctgggagtgctggcacatgcctgtaatcccagctacttgggaggctgatgcaggagaatggcttgaaccgggaggcagaggttgtggtgagctgagatcgcaccatcgtactccagcctgggtaacgagcgaaactctgtctcaaaaaaaaaaaaaaaaaaaaaaaagtcaactgggactgtggggtctgctaccaaggagcccgataagctccttaggcggggtgcttgaataccttacaacatggtggctagcttctcccagagtgagtgaaccatgaggaaaccaaggcaaaactgctgtggtttttttaagttttaattttacttatttatttttgagacagggtctcactctgtcacccaggcttgagtgtggtgtgatctcagctcattgcaatctctgcctcccaggctcaagtaagccttccacttcagcctcccaagtagctgagactacaggtgtgcaccaccacacctcactaatttttgtattttttgtagagacgggagtctcacagtgttgcccaggctggtcttgaactcctgagctcaagtggtcatctgcttcggcctcccaaagtgctgggattatgggggtgagccactgcgcctggccctgctgtggctgcttgccagccatggaagttatacactgtcacttccacagtattcttgggcctactgccagctatgacttaaggggaggcagttacacaaaagtgtggctgccaggaggcaagaatcattgagtgctgtcttggaagctggctgccacaggaccctgaggtagctgtgttcagatccctgctctactactcaaaagttaggtcgtctggagcaagtcatttcatttcaatccccgtttcctcccatattttaaaaataaaaataataccttttgaataatgcccattatgatacaaatcatggattctaaataactaattataaaagtccttgtgatcagtgttttttaagatttggaattttggccatttggaatttgttttgagaatgacagataacgtataaaaacatactctctggcaatttataaaagacttaagacatggtagctgttatttgtattattaaaccatgaagctttgaatctgaactgtgtgtaagcataaaaacaaagataaacatattaagttataataacgttctttttagcaaaagtcttagtcacacagcttctttcactttatttattgatttttataggtaagatcttgtactgtcacccaggctggagtgcagtggcacaatcatagctcattgcagccttgaactcctggctcatatgatcctcccactccagctttccaaagtggtgggattacaggcatgagccagtgtgcttggctgatttttaaattttgtgtagaaatgggactttgctttgttgcccaggctggtcttgaactcctggcatcaagcgatcctcctgcctcagcctcccaaagttataggatgagccactgtacctggcccccattataatctgggttttttaaatttaaatttttatttttttaaagagacagtgttttgctgtgttgcccaggctggtctggaactgggctcaagcaatcctcctgccttggcatcccaaagtgctgggattacaggcatgagccactgcacctggcctagaatgtatacatgtttttatttatgttttcctttcctgaaaggggtaagccagtcactgaaatagcaaaaaccaaattcctcatctagtcttcattaatacccccaaataagaaatacctaatctgaggtctgctgggtcatgcaggaaggacgctgagagacattattgatgagtttagcatgtctgcagagtggacgtgaaggatcacctcactgcatcaccgcctctttatagagattttagaaaatgctcacttgtaaaagtagttttagaaagcatgaatcagtgccctttgagttgactggagtagtcaagaaaagttttggttttaaagtgatcattgtgtgagatcatgttactgttttgctggaattgataacgagcctggctggaagaaacctggtgtttttgccccattttatttcccagcctcctgtacttccctcttccccctgatcagtccccctcccccatgctagtctaggtgaacttcctacaagccacagagccttcctctgtcacatcttcccatctgccactgccccggccttccaccaagtccttctctgctctgacattcatccagtccctgcctacctccttccagaagccttccctaaggctaacgtctcctcccgggtgccagcgtggaccctccgtgcttgtactggcgtgtttactctcctctccactcattttggttatttgagcactaacatttactgaacatttgaagtcctaggctgagttctaacagcccaaccaccctgatttttatcctcattttacttaagagggtaatggaggttcagagaggttaagtgtgcctaaggtcacacagcttataattggcagagcagagatagaagctcaggaagtttttcctcacttagagcaacttctacttaagtattttacacatctgcattcctaatgcctggcagagtgccaggaacatagtaggtgctcaataaatatttaagatgaactctcttaagtggtaaacatcgtcacaaattatttctgtacatttctttgtaaaatgtagcctcccttggccttctgcaggatgaggttctgagttactgctcttccttgatcctcctgtggctgggaggtcacttaccacttcttttgtgattatactgttagtttgctgcttaaaagatgagcatgtttgcttaaaattctatgcatgacatatatgcattgagaaaaggatgttacggttttctttgcatgagattaatccaagtggtttttattttctgctttgaacttctctgtattttctaaagttcccacaaatttttattgcttttgtaattaccaaaccatgttatttacaatgagaagagaaaactatttttttcggagtgcatgaaaaggaaaaccttaaatttttttcccctgtggattaagctaagcctgctacacatataaaaagtcatgtaagacatactttggctacagaacatgcattgcaaatctgtccctactctactattgaaaccacctactcaaaggtcattttcttattccagtgtgtcaaaggcacataacaaagtaagggaggtgcacatgatacttgagtgagacatggtcttcttggggagatggttattccaaggagtttatttgtagttcagaagttcagggttgtcagatcaaggttgtccaggtcagtgggatgctttggttttggaggtagaatagcataagcatgaactcaggctccaggtaccatttgagaatagtaactccaaagtcacataaaaaaaccctaaagtgtgagtttgaggtcaggctcagagcctttggcaggggaccagggacagggaacagctgcttttctcaggattataggcaatttagccaggactgtaggggctaagagactgtctggtggtttaaaaaatggcgtgcttcactgttaggaaagaaaattctgagaaatgcagaggtggttgtgtcttccgtctgcgtcatgctgtttgtggccgcacctgcctgttcacctggaggagctagacagggatggctcctccattccttggagagctaggaaagccagctccattccttgctttccctggcataattttgggccaggaaggttcatcagtcctaaagattgagcagaaaaataagaaaagtctatcttcaaggtagagaaatcccggtgatctgccaaaacccatttcctgaaaattgcttgagtctagtgtgtgaacaagcatggcaaagtgcatgtaggagacgccttctggcccatccttggaatcgtgctccttgatggggtgctattcccacggccagttttgtgctattatcatgctaggcactgtgctcagcatgttgcatagatttttacttgaccattcaatgaggaaggtattcgtttgacaggaagctgaggcttagactatacggtattatgcccaatgtcacacagctaataagtgaagtcaggggtcttcttgtagtacaggtgtccctgagtgtgccagatgagggtgagaggagatgtatcttgcaagatcagggtcagacccaatctttattgaaaattttattgctttgttcattgtggattttttttaattgtgattttttttttttttttgagatggagtcttgctcttgttgcccaggctggagtgcaatggcgtgatctcagctcaccgcaacctccacctcccaggttcaagcgattctcctgtctcgacttcccaggtagctgggattacaggcatgtgccaccatgcctggctaattttgtatttttagtagagatggggtttctctatgttggtcaggctggtctcgaactcccaaccttagatgatccccccacctcggcctcccaaagtgctgggattacagttgtaagcctctgcgcccagcctacttgtgattttaaaaaatattcattacacatgactatcttaattatggagtatttggcactcccttaaattctgcacccaaggtgagtgcctcactggcctcaccctagtgccaagtaatgagcagttgtgaagttggaggatgaaaatctggtcaatcaccagacgatttcatcatcattttcggcattgtagtacaattttgttttccttcaaggcatttttggaggtcagtcatggtcttaaagatgtactttagcttcacctttgaagatactgacctatctgatacacagttgttggtaccagaggttgcttgcagcatttcaccttttagaaaccaaagcccaggtccagtgaaagcctgtgagagtcactgtggccaggaaaccatgtctttggagcttggtgatggaggtgagggaagaagttaaatctttaaattgaagtcacatcataaaggaactgagaaatgaagcctcctttgagtggatatgccagcactctggcaggtgtgtgctgtaggcgtgatggtggggcctgggctgcctggtgctggggagtggctatcccctttccttgcattgctactggatgacttgggtagaccagccatcctacacagatcgtaaggatagcctaatgtatttcacatgagaatgggctgtgtttcactgaggctttaaaaaaaatttaaaaatagcctcgtttctttaaaagctttttttctcgtttctttttgttaattgcaaaaataaggtcattgtagaaacatggaaagtgaagaaaagtaggcagaatacatacacacagacacctgttgttaacgactaccactccagcacacacagattgcttttgtcatatttgccttatttttaaaaatttttttaatttaaattttttttttgagactgagtcttgctctgttgcctaggctagagtgcagtggtgccatctcggctcactgcaacctccacttcccggttcaagtgattctcctgcctcagcctcctgagtagctgggattataggctcacactaccatgcctggctaattttttttgtttttgttttttgtatttttagtagagatagggttttgccatgttggccaggctggtctcgaactcctgacctcaggtgatccacccgcttaacctcccaaagtgccgggagtacaggagtgagccaccgcgcctggcttatatttgccttattttgttttcttgatggactttattattcatagcagttttaggttctcagcaaaatggaacagaagttagaattcccctatgccctcctgctgaaccttccctaccatcaacatcccacagtttcctttttacatttttaagaacgctctatttttttcaaattggtaatatattatacatacgttttgtgaatttctttcccctccattatcttgcttcagtaatttttttttttttttttgagatggagctttgctcttgttgcccaagccagagtgcaatggtgtgatctcagctcactgcaacctccatctcctgggttcaagcgattctcctgcctcagcctcccgagtagctgggattacaggcgcgcaccaccatgcccggctaattttttgtatttttagtagagacggggtttcaccatgttagcaaggctggtctcgatctcctgacctcaaaagatccgcccgcctcggccttccaaagtgctgggattacaggcatgagccaccatgctcggcagcttcagtagtctttaagtcaacatgattgaggtcaaaggtctcttgaggtcatttcctgttgacctttctctgaggaatgtggctgagttcacatgatgggaagggggttcccagatgtctttcaagcccttgactatattgtgtggcgatttcccagaatgtgtatagaaggctttggggactatgaagtccctaccttcttgtctctctttttctctctttctttccttccctccctccctccatcgttccttccttctttctttctccctttctttcgaggcagggtctcattctgtcaccaggactggagtgcagtggtgtgatcttagctcactgcagcctcaacctcctaggcccaagtgatccacccacctcagcctcttaagtagctgggactacagatgtggtctgccacttctggctaatttttggaatttttttgtagagacagaagtcttgctatcttccccaggctggtctcaaaatgacctcaagcagtcctctcctcttagcctcccaaagtgctgggattacaggccagccactgtgcctggctcttcctgtctctttcttttatcatttgacttttttctcactggcacttggaggagggggtttgggattcactttctattaaaagtgttcttcatgggttagaaaatagaactgtagcgggaatgtttccagaaaagtcttaagtgtcaggggagacacctaaagtgagatgaatcagttaatactcctgtgtgccatgcctgcgtacaagtgtggagtttctaagtggcataggacagatttctaaggtggtgggtaggcaagaactgacaaggtttgccttctcatcgatgtgcagaagagaatcttttccttgtgtaccaacaattctggcttattttgtttgcgtttgtgccgctattcctagctcggggcatggcctgtagtaggtgctcattaaatctttgttgaagaaacccctcttggggtttctggataaacttaccttgaacctctcaaacctgggctgacctcaccagctgtttggcccccatggtctgtaaaagccttgaacttatagtcacaaatgggtggcagatatacatttatttatgatcttagtcttcagacactatttatctactttacccttcatctacctttgacttctagattgtttctgtctctctcatgtccaggcctgttagtctctggtaaagttagagatgctctaacaatgttctaggagtggctgaggcgccttgcaagtcaggagctacaagatcttaaaaacaaatacccatttaggttgctggcgaggttgcggagaataaggaatgcctatgcactgttcgtgagagtgtaaattagttcaaccgttgtggaaagcagtgtggcgatttctcagagagcaaaaaacagaactaccattcaactgagcaatctcattactggatatataccccccaaaatataagtcattctaccataaggacataggcacgtgaatgttcattgcagcaccattcacaatagaaaacacatggaagcaacctaaattcccatcaatgacagattgaataaataaaatgtggtacatatataccacggaatactatgcaaccataaaaaagaacaaaatcatctttgcaggaacatagatggaactggaagccattgtccttagcaaactaacgcaggaacagaaaagcaaataccgcatgttgtcacttataagtgggcgctaaatgaagagaactgatggacacacagaggggaacaacagacactggggcctacttggagaagggtggcaggagggggaggagcaggaaaagtaactgttgggtactaggcttagtaccttctgttaaacccctgtgacatgagtttacctatataacaaacctgcacgtgtaccctgaacctaaaataaaagttaaaaattaaaaacaaaaaattgcccctccccttcaaatcccaaatagccatttaggaaaatcaaatcaaatccttatttgttggtgttttttttttttgagatgggatctcactctgtcacccgggctggagtgcagtggcgtgatctagactcactgcaacctctgcctcccaggttccagcaatcaaaaatacttacttggtagtatggtatcatccagtggtggcttataaattaaacttagcatggccttttcttttttttttttgagacggagtttcgctcttgtcgcccaggctggagtgcagtggcgcgatctcagctcactgcaacctctgcctcctagattcaagtgattctcctgcctcagcctccccagtagctgggatgacaggcacccgccaccacgcccagctaatttttgtatttttaatagagacgaggtttcaccatgttggccaggctggtcttgaactcctgacctcaggttatccgcccgcctcagcctcccaaagtgctgggattacaggcatgagccactgcacccggccagcatgaccttttctaaacacttcaagattatccttctttagcttaattctaattgctggattgcttgactgtacctccatgaataatcctgttggcactaagtcctgtgaatgccttacttttaatgaagagtttacctaatagcatgtaagattgtgcaggaaacgaaggacagaaaggcccaggaaattggcatatggatagtttgcctccatttgttaatttgcgggccaccttggtccgttttgggggcgtggcgtttgttttcaccatatggcgggtgacggaacatctggactgtttacctgacagccacagggcagcatttcaggaactcttgagaatgtgggaaaggacattttagttctagtctgaaactaggacattttagttctagtttgaaagagtcagagagtctgggttgctcttggtaggtttatgctcaaaagccttttaattctttctaattgaatcccttggcttaagattcttttgatttgtatttgattaaacaacaaagcaacacatctgtggccttcatttgtatgcatctttacctactgctgtgaacccaatgagaggtgtctttcagagaacttagatttttgtttaatacaaaacaagctgatattcttaattgttttaggaattacatagcattcttcattgttgttctggcttcctcctccaccatctaatgtgtaaatatgtgtgaaaggggaagatctccaaaatagagccatggtctggcaggttgagaggtttgtcagttagaattgtcccaagtgggtcggccgcagtggctcacacctataaacccagcactttgggaggccgaggcgggtggatcacttgaggtcaggagttcgagaccagcctggccaacacggtgaaatcccatccctactaaaaatacaaaaattagctgagcgtgttggtgcatgactgtaatcccagccctttgggaagccgaggtgggtggatcacttgaggtcgggagttcaagaccagcctgggcagcatggcaaaaccctgtctttactaaaaatacaaaaattagctgagtgtggtggtacacacctgtaatcccagctactctggaggctgaggcaagagaatcacttgaacctgggaggtggaggttgcagtgagccgagattgagccattgcactccagcctgggtgacaaagccagactctgtctcaaaaaaaaaaaaaaaaaaaaaaaattgtccaaagtgaatgatgtgatgattgcttcgttggtctcattcttctttatcctttaagtaatttaaaatcatactgtaacttggcatgttatgctgatattaaaagaaatgaaacagtttttgaggagaaatgtcagtgttttgaggcagattgtaactattgaagatattgtgagtgctcctctgtgcccaaaggtggacatgcattgatttttaaaccccaccaattcagagttcaggacagttgaccctttgtcagtctaaagtttgttttaacagaaggccgtgggaaaaagtttgttacacaaataatgaaaatttacaggggaaagtttactctatttaaaaaagacttttcccaacacttcagcatcattagtaattttttcccattaaaacaaacctggtaagaccttaatatgataatctctcatcattaaaaaaaaaaaaaaaacccttccagaaggggtttttttttttttttttttttttttttttttttgtctcactctgtcatgcaggctggagtacagtggtgcgatctcgggtcactgaaacctctgcttcccaggttcaagcaattctactgcctcagcctccagagtagctgagattacaggtgcacaccaccacgcctggctaatttttttgtatttttagtagaggtggggttttgccatgttggccaggctcgtctcgacctcctgatctcaggtgatccacctgccttggcctcccaaagtgctgggattacaggtgtgagccactgcgcccagcccagaagtcttttatgcatagacatttagcatgaatagtagcataccctaaatatggtgttgtgcttgttctcttcagtttaatacactccgaagatggtttcatattagtacatacagattggcctcattctttttatcggcatataaacagagggtaccattaaataatctgtaaaattttccctgtcaatagacatctaggttgttctgaatattttgctggtctaaatgacaccacactgaagatgggtgatacctgaagtataaaatcctagtaggatcagtggtcaaaggctgtatttgtttttaatatacatagatattgccatattgccctccatggcttacaaccttataaccgttcattcgttttatgaacttgcatatagtgcttactttgtgctagaaactatatcaaatgttttacaaatattaacttgtttaatccccaaagctacctgtaggggagaggtattattattatcacagttttgctgatgaggaaactgaggcaggagagatgaagtaacttgcccaaggttcacctcaagtagcagagcagagatttgaacccacacaatctggatctgctgttggctcttaatcactgtgttgaggctgtttttcccaaaccggaaacctacagtgatggcaaatattttcacctgtcctaatctgatcagtgagatgccagtttttctttcttttttttttttttttgaaacagggtctcgttctgtcactgtggctgaagtgcagtgtcgtgatcatggttcactgcagacttgacctccctgggctcaagggatcgtcctacctcagcctcctaagaagctgagactataggcgtgcactaccacacctgacttaatttttttgtatttttagtagaaattgggttttgccatgtgtcccaggctgatcttgaacttttgggctcaggcaatctgcctgcctcggcctcccaaagttctgggattacaggcatgtgccaccacacccggtccagtttttcttaattgtcattttgcacttttcttactactcgttgtggttgaatacattttcaaacgttgacaactcgacaagccattggtattttcttgaccatccttctactccctgttcctgtcccttggccaattttctaggaggttgcaaatatttttcttattgatttataggacttcctttatatatggagaattcttaattgatttataggcgttcctttgtatatggagaaaatcagccctttataatatgtaattcaagtactttttcctagtttgcttttggctttgcacttttttagtttttttcccttatggcatgtagcatttaggtcatgcttagagagatctgcaatttgagaacagttttactttttttttttttttttggaaacagtctcactctcactctgtcacccaggctggagtgcagtggcgcgatctcagctcaatgcagcctctgcctccctggttcaagtgattctcctgcctcagcttcccttgtagctgagattataggtgtcgaccaccacgcccagctaatttttgtatttttagtagagctagggtttcaccatgttggccaggctggtcgcgaacttctgacctcaaatgatccgcccgcctcagcctcccaaagtgctaggattacaagcatgagccactgcgcctggccgcaaacagttttaaaaaatcttatgttgtcttctagaactttatgattcatttaaaaaagtctacattgactcaagtaatattgggatctaattttatttttctaataataatcagtagtaatgatgcacagctatacacgaataaagagccttccaatagattagatttggtgccatgctggccgggtgcggtggctcacgcctgtaatcccagcactttgggaggccgaggtgggtggatcacgaggtcaggagatcgagaccatcctggctaacacggtgaaaccccgtctctactaaaaatagaaaaaattagccaggcgtggtggcgggtgcctgtagtcccagctacttgggaggctgaggtgggagaatggtgtgaacccgggaggtggagcttgcagtgagccaagatcgtgccactgcactccagcctgggtgacagagtgagactccatctcaaaaaaaaaaaataaaataaataaataaaaaagttttggtgccatgctgttgtaatagactctactatcactattgacagctaaactgcatcataagctttgtggctcatgtatataccataactaattttcctttatcgctgagttttgtttcctgtggagtcaatggttatcttgcttttcctttgcttcattttccacatatgtatctaattaattctgaaactctcacctgttgtctaaatcgacttttagtctcttcagattaatcagatcattagatatcctgtttcatccttgagagatccttgtccagaagtcttcagactgggccaggtttctcactggcctggtcagcgtcctggggtctcccctactgtaatctactgggggggttccccttgcctctatcacctgatgtaggatctttgtcctggacagcttcagggatctccccatgaccctgatgatcccctttgcttctctttcttgaaatttgtttcctggagcttatcttctgatttctgtgttttttttcccccttcattctggtagagcccttcccaaagtgattggagtgataaatgctttgagaccttgtggatttgttagaagatcagaaaacaggatcttgagctgagaggctgtttaagaagtagttgaaatgttcaggtgtcctgtacttcctgctgtgggcaggggggatcagctctcaacccccgctggactcacccaatgtggtttgcagtgcagtctttgtttaactcaatgttggtgtgtatatcattatgactgtgtggacttgttcactgctgagccagataatgccctatgatagttttcttcaaaaactgtttttttttgttgttaagataattcattttttaaaatttgtttgatttttctacgtatccattgctaataacttgaaccgacctatcagttttctttcaactaatttgtactgatctctaagccatatatagccattcagttcccccatcatcctttttcctggtgcttcaccttctgtagcacccccatccttcagcttctatctgaatgggttgtactctaggcgtagttcacaaccatcattcaggggctttcctttacccttcttctttcttggacacgctcttttctggattccgtatcatctcatttcatgatttactgcattgttttggtagaacacatacacccgtagctttctcagaaaggtaaagaagctacatttcttttgaatctttaacatgtgaaaatatctttgctggatgcagtggtgcatgcttgtaattccagctacttggaaggctgaggtgggaggattgcttgaggccaggagttcaagaccagcctgggaaacagggcaagaccttgtctcgtctcttgaaagaacaacaacaagaaactttaaggcatgcttagatttccttgataattttactacatacagagttaaaaatggaaactactatccttgaaattttgaagacattgctccgttgtcttctaacatattttggatatgatttaattttttctttttctccctggaacattttagaatcttaagattttaaagtgtcacaacttctgtcatgtacttcggtgtagatccttttaaaattatgctgggtattttgctttctccatttagtctggagaccattgtccatcagtctgagatatttcctaagttttcaaaaaaaaattcttctaaaaaaacttcatattatttgattattagggctttaggaagattctctactttcctacctttaaaattttccatgtagttatgttttgccttactttctatgagatctcttcaaattaatctttataaactaatatagaaataaaactttcaattatccatattatcaattttggggagctattggccttttttccatagcaactcttcttgtattttggaagagattcttattctcttggggaatagtctagattttaaaacattttcttctgctccctagaatgtctgcattttttttgtttttgatacagagtcttactctgtcacccaggctggagtgcagtggcgcgatctcagatcattgcaacctctgcctcccgtgttcaagcaatcttcccacctcagcctcccaagcagctaggattacaggcatgcgccaccatgcctggctaatttttgtttgtttgtttatttgttgagacagagtcttgctctgtcacccaggctggagtgcaatggcgcgatctcggctcactgcagcctccacctcccgggttcaagcaattctcctgcctcgacctcctgagtagctgggactacaggtgtgtgccaccacgcccggctaattttttgtatttttagtagagatggggtttcaccgtgttagccaggatggtctctatctcctgaccttgtgatctgcccacctcagcctcccaaaatgctgggattacaggtgtgagccaccgcacctggtctaatcattgtatttttagtagagacagggttttaccatgttggtcaggctggtctcgaactcctgatctcaagtgatctgcccacctcggcctcccaaagtgctggaattacaggtgtgagccaccgcgcccggccatctacatgtttttagaaggtttttttcctcttctttgttttggatgtgactttcattttgcaggcttttcttgaatgcgtactgatctttggctgatccaaggcacttaaaatcaggttggaatttttgtgcacatggatggggcttgtcaattgttgatttttctttaaaatgatgaagcagcaactggtcatttttgtcaaaggaaatcctcaaatatcagtatatgtgctcattgagatggtcctgagaataattctaccagccctgcctggaataaacctggataagctattctggaagcaggatggaagaaggggactgtggaggtttcctggtacagtaagtagactgattcttcctcaattcccaacacctcgtgcctcattttcagccctgaattacacacaccctcttcgtcattgtgcctggcgtatgtgagtttctaattttcctggttcaatgtccttgggtaataaacttctttggggtttgggtaggtgggagagggtccctgggtgcaaaggtctagcctcttcgtatagtgacttacaccctcttgtttcccacgcccttccccctcccattcagcatgagcctcctgggctttggactattttgttggaattctctgagcatcacttatgatacaaatcatcacagacctctctcttgctttctgtcacccaaaagtcagtagaatgttttatctgctcttgttcctgctgctatagtcctcttaaagtatatttactggcatttttgtaggatttttggtgttgatacaggcatgtggttaatctgccatgttcaactggaagtccattttattttaccaaggtataacataacatgatttaaaaatttactgtaatagcagtaatcataccagagctacattgttaaaaaatatgcaaaatttttattttctaagggtgcagattcagtcagatattcacagattagtctaatttatatgatttgcttaaagtcctcctccccaccaatgaggtagcctctgaactcgtctgagagtgtgaatgacatttttgagttgaccattcagacttgtgcccctgaacgtatctgcacacgcgctcggtcacatttctctatctcattttcttccctatcacacagaaaatcacattcagcctgaggtttggttttgttttgcattaggtctctggctgcaggtgttgtggcgctctgggggtgtctgcctgcctcctgtcagtgcagcagttctcttctggatggtaacaaagagaagatgtcaccgataatgcagggccatggaaatccggccgttctttatctgtgctctgctgtttgttgggcggggtggggaaaagtatgagaattctagttctgattagccgtgaatgagacttttctcagtgggagtcctgcggacaccagggtgtggtgactgatttcatttctgctgctcagggatgtctcggtggctgtcggcccagagtgcttggaaggcaggagaaactggcaggatcagcaaggctctgaaaatagggcgtcatgggggttggcacgggggctggggctggtctccggcagtgccactgagcagttatgtgaccagctaggtttctggtctccttgacccccttggaatttcctcatgacctcacctccccaggggttgtagccaaagaatgaaaatcacagagctgcctctagcatagcacccttaaaatgctcggctatgaaacgaacagttccttaacattcaacagacagaagcagagaaaagttacctgttagcccttaacctgcccgcttcctggtttcttttagaccttgggcaagtgttatagttttcatatttattttttggaagtggagaagctggagagagaaggaagtgagctaataaccagcttttcaagagtgctgacttctgcatttcttagtacaggattttgccaggcccttgacattcgtttaaaggaagaaagaattctttctccttgaacatctgtgcaaatcagtgggggtgggagtctagagcccaaggagagtatgagataactttacacgtttctgaaagctaggatgagagacagcagatccacgttattgtactgcactggcaacaacccagtagcaaaggcagaccaatgaaatgtgccaaaaagatgcatttgtagtgtggtataatcacattttgaaaaatgtgcagtagataagtggggaaatacgcattctggttgcttcataaataatagtagttaaggatatctatcaatctcgtgttttttagctccagcactgggtatgtagaataaaaaaggcaaaccgaatcagtttggcatagagctcttttcaaattcagcatcatttcagtgcatttcagctttatacatagctctcagccaggaaatctcaggtttaattaggtcatttgttcttgagagttctgtccttgcaaaacaggagaggaatttttatgggcagttggcacacagaaaaagtcaacagcaaaatgtccctgttttcttcaattttaggtggtacttataaaaactccttagaaggaattttgtgtatttcaggatattaatcaatctgggtacagtgttttcaggttttgattttcatgtgctctaggtttttgcctctcctggagtctttggaatcctaggggtttgtgaccttggaatgcaggcctgtgaggcattttcaggatttcagaaggcctaaccagaaactggcagtcatggggagagggaatggagctgcctccataagtccatgcaaattaatgaaaacatcaaagcattgtttggttttgccagatttttctcatgttgctcatgttgattccgaaggacttattgaccattacgtgtgccttcagtgaacagaaaaaaggtcaagtcagttgttgcttaactgcagcctggctgatgtgttcttttgaccggaaagataggggttggggtgtgatgtggtgggacctggtccagacaggataaagtgccggtaaccacggtgctaactttgaaagccagctggccccacactgctcttcacttccccagcagggtgctgtgtaaggtggtgcagtgctgatgggggactgtcctcatccctgttctgagctgtttcagcaaaagtctgaggggtcgctccagcgttgtgaccttagagcgtggtgatgggaaggactcagctcccaaggaatgtgtgcactccctgcagtcctgcttgcttcttccttccaactccagaatgtttatttcatacattaatatgaaaaatacacagaaaaaagactggaaggaaatcggccaaaatgctagcagattttgtttacccactctatgttagtaaaccaaattgccaaattcggcaacgcttactagtgatcgcctttctgcttaattttgcaaatgattgattatgaaccttattctgtcattttaaaaatggaataagaactatatatcttagtgcatatttggaatgttttcaaaaggttggtgacttggagcacttgttgacaaggttcacgagcgtagctgagtccagtgtctaggaagggacatacatgaagcattgtaaagaaactcgagtgagccttgggagaaaaatcctggagccagagcttagagtttctgcttcggagtgcctgaaagtttcatatttcttcttttgtgcagattccaaatgtttttggaaggcttgaaagtgaataaaatagccctttgacagaactgacaaaaacggacggacttaggggtagggcccagtaagtcattgtacacaagctttgtgttgttagctttggcaaggacaattcttagagaaagctctatgtgaaatgccagaataaatggctcacttttatggggcacttgaactgtctgccttgtcgactatcaagctgccattttccctgcttgaattacaataatcgatatgttgatagcacatactgtatgtcaggcactgttctaaatatgttaatttttgcttcaaaacaaccctgtgagatactactatgtatgaggaaactgaggcacagagaggtaaagtaacatacccaaggtcacgcagctgtaactggtagaaccatgacttgaatcctatctcgctcctgggtctgtgccctcaaccacggctctgcttttgtctgcaacctggccatggtggtgggtgggtcgatgggtgtggttcaaggtcaaaatcacgtggaaagttttgccgaagttcgctctgccgcagttgcttgcatagccgactgctaggtagcttggtttgactgacttttcactaactgactttttattgagctacctgttggccattaaaaaacaggaagtatgtgagacatggtttcagtcttcaaggaattcacagccaaagttgatatatgagataggctcttatgaaaatttacataatctgtgtcagttccttgtaaggaactcatcagctgtgaggaactcagcgtggatctgttggtgtttgtcttgggagaggaatacattgccattttaagggagaggatgttaacatcagccaaacaaaatcaaatccaaacttcagcgtggatattcttctgtcaactcctcccctccttggttcttaactgatatcctttatttgctgttttggtaactcttgaaccccatcctctccactccctcccggtcttggttccatcatttcttccttttctgatatctctttttagcttttttgaaaaaaaaaattaattatagtacaaaacataaaatgtacccttaaccatttttaagtgttcactcatattaggtatatatatattgatgtgtaacagagctttataactttttcatttagcaaaactcaagctctgtacccattaaacaacagctccccactcccgctcttcctaacccctgacaaccaccattcgactttttatgtaattttgacaactctagataccttatattagtgaaaaatcatacagcgtattggtcattttgtgactagtttatttcacttagcagtgtcgtcttcaaggttcattctagttgtagcatgtgatccttaaaaggatcagtttaaatctttaaaaggatttccttcccgttaaggcttaatagcattccattgtgtgtgtgtatcgcattttgtttgtccattcatccatccatggacacttgggttgtttacacctcttggcttttgcaaataattctgcagtgaacatgggagtgcacatacctctttgagatccggatttcaattcttttggttacatactcaggcatgggattgcaggaagactgtcatctctctcatcttactcaacaggctgcttctccccagtgtacatacagacttgagtctttcttatctcttttttcctaaaagaacaaaaaaatttatttaaatgtgagaattatgggaaacctaagccatgggaattggacactcatgggggtcttctgtgaaatgggacttgcccccaccttctgcagcctgaagcttttgcagtttcgccatcagttctttggcggggttaaagatgccgccggttggctggtcacagatgtagcagcgcggggtggcccggaagtgctccagcgcgcagctctcgcagaaataatgcctgcacttggtgacgactgggttttggaaggcctggcgacatatgaaacacctgaatggtatttcctcttcctcgcttcccacttcatggttttcgtcctcgcagatacagtagcgaccctcttcaagctcccgttcaatctcccacccgagcttgtaatcggaacggtcgtggaggaatttgcagctgtccccgaagccacagaagccagtctccttgtagtccttgcagatgtcaggctggtaatcccagcgcacagtggcgcgcagatgccctggcgcacgtatggggcccttcctcgccatccccgaggaggagttgcccatggacgtgtccttgggcttcaggtacctcaggtagctgtggattccccggtagatgtggtcgtgctcccgaccccgcagtgcctcctggacccgctggctgcacttgaggatggtcggcgtatggtgctccttctcggtgtcctgctcgaagtcagcggtggcccccatgtcctctggccccacaggcttcgccgagcgggtggacctgtacaccacgtcgaggctctcaggcgccgcctcctcgcccctcctgtcgccgtgagccgccttctgccagctgtggaggccccggggcctcggtgccacccgcgggggctgagccactgtgtcgccctcgtccccgctgctgctgctctctccgtgctcggggtcgcaggccgggcgctttctgaggcctgcagcccctttccgtccaggctttttgaagaggaaggtgcatacctggtctgcttggtcggccgtccttcctggagaaggtggcgctgccatgtttgagtctcaggctcccaacggccgtggcgtgcgtcacccttgcgtcgcccttgcgtcgctgcacgtggggcgtgggccctcccagttctaaaaagcaaaagcaagtgaaagaaaagcttctgctaggccaggcgcggtgactcactcttgtaatcccgggacactgggaggccgaggtgggagaatcacccgaggtcagcagtttaagaccagcctggccaacatagcgaaactccatccttactaaaaatacaaaaattacctgggtgtggtggcgtgcgcctgaagtcccagctactagggaggctgaggcagaagaatcgcttgaacccaggaggcagaggttgtagtgagccgagatcacgccactgtactctagcctgggtgacagagcgagaccctgtctcaaattaaaaaaaaaaaaaccaaaaaaaaaggcttctcccgcccttccctcccttgacctgcctcctggccctcagatggattccttgagagagtcatcttcacttgctcctcagctccctcagtgcacactcatttttcaacagattcctaaaaggccacgggtggaatcattccaggccatagcgaaccggtggtgctcatcctaaaacacaggcgcttgaaatgcgtatttaaaagcaacacacgcgcagtgcagaaaacaaaaacagatacaagcaaaaagtaagacgcctataatccctcccctcaaagataaccactgtcaacacttttgtgtctattcttttaatatagcctttattaaaagactgtcatatcacactgcacctgtgggtgtgtagctggctttcattttgaaataaaagtaacacatgtaaacatttaaaaaaatattatcaagcacttattgtaatggaaattggctgtcccctgcctggcccctccacacgccaattcctggtacctaagataatcatttttaattttttttttttttttttttttttgagaaagagtctcgctctgtcgcccaggctggagtgcagttacatgatcccggctcactgcaacctctgcctcccgggttcaagcaattctcctgcctcagcctcctgagtagctgggattacaggtgtgtgccaccacacccagctaacttctgtgtttttagtagcgacagggtttcaccatgttggccaggctggtgtggaactcctgacctcaggtgatccacccaccttggcctcctaaaatgttggtattacaggcgtgagccactgcaccccgccttcaaatatttttaacccttttttttcttgagtttatcttcaagttgtgaaataattcatttatataatgtaaatggattctagttcttatttagccagtgcatgtcataaagtgttacatgcaatttctttttctaatttaggttctatctctttacttactagaatggaagatgagattcagctcacttgtagtgcccccaaaacactggctgctgtgggatgagggagaagttgtgtgggtctctcttcctagacaccaaggcatcctcagctgttggaaatgtgatgaataagcttacagtgtaaagaacaattcatcatttgtcagttttctcttaggatagtaattctagatttttcttcaactgttatcatcccatctttcatgttggaagcttttctaaaatacttggttatctccagctgtttatacttcagagtgaggtgcctaaaagctggctggaatccatcggtattgttgggcttgtacactggactgtcctttgtgtgattcagttggaacccatcttttttcttggagacccccagatgttggtgtccatattagtccgttttcacgctgctgataaagacacacctgagactgggtaatttacaaaagaaaaaggcttaatggacttacatttccatgtggctagggaggtctcacaatccatggtagaaggtgaaaggcatgtctcgcatggcagcagacgagaacagaatgagaaccaagtgaaaggggtttgcccttataaaaccatcagatctcatgggatttattcactaccacaagaacagtatgggggaaactgcccccatgattcagttatctctggtaactgggtctctcccacaacacaagagaattttgggagctaccattcaagatttgggtggggacatagccaaaccatatcagtgtccataggtcttttctgctgggttctcgagtttctacagagaagacttatctcacattccgctgtggggtgtgatctttgctgccagaattctgtgataagagctgtagaagtgggctgggaagggaaggccttataatttggggtataaactttgacttggcctggcatggtggctcacacctataatcccagcactttgggaggctgaggcaggtggatcacgaggtcaggagatcgagaccatcctggtctaccccatctctactaaaaatagaaaaaaaaattagctgggcgtggtggcgggtgcctgtagccccagctactcggaaggctgaggcaggagaatggcgtgaacccgggaggcagagcttacagtgagccgagatcaagccactgcactccagcctgggtgactgagcaagactccatctcaaaaaaacaaaacaaaacaaaacaaaaaacttttgacttaattcctcatttttagtaaagcatctgattcccacctttggttgttcccgggccctttgagcttaggccctcctagattcagcctccacagaagagatatctcctgcttctgccgggctagggaaagggtagccaggctagggaaaggctagggaaaggctgcatggggtgggagattgtgttagttttgcattgctataaaggaatgcctgaggctaggtaatttataaagaagagaggattaattgacttgtaattctgtaggctgtacaagcagcatggcgttggtatctgcttctggtgatggccccagtaaacttccagttgatcacagtggaaggcaaagggggagcaggctgtgtcacatggcaagagtgggagtgagagtggggaggggccacgtacttctaaacaaccagaacaagatccctgggtgagcacccaggaaatggtgctaaaccactcatgaggcatccacccccatgatccagtcacctcccaccaggccctacctccaacactaaccacatttcaacatgagatttggaggggacagacatccaaaccgtatcagaaaattttcagattctcagccagtcttcttgtgtggagccatatctgtttccagtgatacttgattcttgcagttcctgggatttgtcttgaaattggcatgctgctgcttgtcatctccctccacagccttcagtttcagccttcttccaagttagttgagatttttcagctcactttatttcttctaaaatattattgatgttcttgttttctctggtgtctctttcttctggctccttttgtgggaatctgcctttgtaaagtaatgtttatcattttagtgggattttgggagggaataggggtgaatgcctgagtgcagtctgctgtgttgaatgaggaatggtagtgggctgtcttcacttgataagtattttcccctgttccttagtatttctccataatgtgcattttaatgcctgcataatgatcaattgtatgagtctatgatgccttattgtcctaatactctgttgttagattatgtgtttcctcatttatatacctttccctgtgtttacatttgttttcttagggttgattcctacaaacagaattacagagtttaagcatttttaagtctttttttttttaagacagaattttgctcttgttgctttctgaaagagttgtattgtatgtacatccaccagacatgcatgagtatggccgtttcattgcagatagcacttctccctgctggtttaggtccacacatgcctactaagtgaaggaaaaaattgggatgaaccaaatgaacttcagtaattctgtcagctcacatgttaacgtagcttggctgtctgaggttacatcctggcgctgtgaccgacagcaaatgacctaactgccctggatttcagttttatcccctgcaaagtggggtataagaggaagaataataagtgaatagacttaagtttagatttttgcctggctggcagcgatggagaagagcaaaaccaataaagtcagtttcttaggtagtaatgaaaagattgttctttattattaaaaagtgacttgtttgggaagaagtgatacattctcattataaaaaaaatacaaaaaagtaaaaagaagaaatgaaaaacctcaccctaaatcttaccatttagaaataatattatttatttatttatttatttatttatttatttatttatttatttgagagagagagagagagagtctcactgttgcccaggggtgtgtggcgcaatcacagttcagtgtaacctcaaactcctaggctcaagcgatcctcctgccttggcctcccaaagtgctgggattatagacatgagccactgtgcctggccaatgatgttggtaacattttttgagccctgtctagaacttgccatggtcatggggtcttatcacacatggtatttaatacttaaagatgtaaaataaaatagacttgaattaaagcaaaggaaaagaaactaaagcaagatagaaatgctgacttcattgcaagagagattagcgctatcttttagaaactaaatttatgacaagatgataaataataaatactaagagattagaataatttcttataaactatgagtttgtgagactctctcctttgaaagctaaaaaaaaaatagaactgacctatgctccccctctttcccaagctccaaaattttatcagttaattatgaattttacagtgtgaaggattgtaacatttctattctaataatgccacaattcccatagctctttgacttagtccccttttaggatggattcagaacttgttagtctttttactgtttttttttaccttgcttgagttttaaattttgactcattggttggttcattgttttatttatttaatcgattttattttttgagacaggatcttgccctgtcgcccaggctggagtgcagtggtgccatcatggctcactgctgcctcaccctcctggactcaagtgatcctcctatctcagcctcctgagtagctgggacttacaggcacacgcccccacacctggctgatttttgtattttttgtagagactgagtctcgccatattgcccaggctggtctcaaactcccgggctttagtgatctacctgccttggccttccaaagtgctgggattacaggggtaaacccagtgtggccgcatccagccacattattttatttagagaagccctggtaggtactgtgttccttgaggtcttaacacttaaggatagctgttccttgcttttatatttgaaggacaatttggccgagtaccaaggtcttgggccacacgttcttgccctcagaatttcttagacattgctcccattcttttttagcactggatatttctggaagagaaagctgaggctgggttaatgtttctttcttttgcacatgactagctttttccattggatgtgcccatgaggttctctgattctttttgaagtttagagttttaccagcattgcttgggcattggctgttttatgtcactttcctggtatgtcctataccataatatctgttgattcaagtctgtctttatatcagtaaaattttaagatcctttaatatttttgcatatattttgaatggtgctcactttttgggaaccatagttgttaggttttatcttctttgccttctaaatctagcatctattcttattatcatttgtgtatctttgtccctcttgttgttcctttttagtaattttgagtgatttccttgtttgttctctgcctctgtttacagaagcttacactatgttttactgtagttgtgtggcttccattctggatatttttttttctagtccatttatttcttcaactctatcagtccatttaaaatctcttagattgatgactgtcagttctttggaacttcatatctagtctctgagctccccatttttagaaggaccattttatctttaatatttttgagacaatggaggactattttttctgagctcttagtctgttaccttcgtttttcaggcccagattcctgggcatgggacctctgcatccacttaagggtccacgcttggacgaatgctcccgtcattgtcttgaaattgttaataatttctgaacagcgggcactgcatttttgttatgcagcagcttctgttgattatttttacaaacgcaccttattagctgcctttgcctgtgttcttattcagtggtcgctcatctttgaatgaggccgagctgtttgccgcaaaaactggtgtggggtatgctgaggactggaaggcaggggtggggagtgttgtgaaacctgctcatactcgctgcctccactgtcctccaaacaattgttatttcttttaccttgagaatgatcctccttcggtttttggcttttaggaggcttgtgtgtctctctcacagccagtccccttagcgccctggctctctgaggcttgacatatggtgggcatggcggttgttcccccaggccctttcttcaccctcactttccttgttaatccaggccaggtcataggtattaaaaatgacatccacatggtttctccttcagttccaccttcccagttagattttaacttttaaaatacttgagaagggagagcagtgtcagactcaaaaagccagcaagcattgttttttgtttgtttttttttgagatggagttttcactcttgttgcccaggccggagagtggtggtgagatctcggctcactgcaacctctgccttctgggttcaagcgattctcctgcctcagcctcccaagaagctgggattgtaggcgcctgccaccccacccggctaatttttgtatttttagtagagatggggtttcaccgtgttggccaggctgctttcgaactcgtgacttcaggtgatccacctgcctcccaaagtgctgggattacaggcatgagccaccacgcccggctgccttttaatgtgtcattttaatgtgtcattttaaagttctgtgctaataaggatgtaggaggttatttgatttttggaaaattgttcatactatattaacatgtaaaggtgctttatgaaacagtatgtggagtgtgattcacctgttgttgcttcttaaggaagtacgactctacattaaaaaatatttgaagggaaaaaaataccaaaatgcgattgcctggattcctaatgtccatcctgcttccgcctttggtgatggtgtatagcagtggccaactccacagcctttacattttctcagtgatcctatgctctaagaatttgtgagggacttgtttttaaaaagattgtttctagtaccgtgtctactctcttttgtggattaaaataaattcattctgatgtttttggcaaatacttcaagtgtattttaaaatacataattttattgacaagatactttgaacagggaagaaccagtttcacaaccagctctcttgaaaaacaaaaacaaaactctaattcatagagtttgccagtttccgtggtgtaaatatttccaccatggccagttgcaggctaccaacatgacatcattgcacacagagttaggaaaaagtgtgtggtagcacattcctatgtagtattgttaccatccagatgcagcaggcaaaataacctcacaatcacagatagataaaagtaaaatgtaaaataattgggaagtgatgatttttgagtattcattacttctgtaaaatttatgcttaataaatattgatataatttattttaatccatatctttatataataactggctggtaaaaattcctgaaaatttaacagcaggtccccatgagttgatacaaaagcagtataccgctggaaagagcccttgaatttttagaaagggcttaacagggcaagtcaagaaagtgaagcatgcaggcgttgggattggtaagataaagctctctatggttggttcaggtgtcgttttgtcctagatctttatgttgggggggcttccttttctgtttaaggttcctcgtgatcagaacacccatagaaaacttggggagataagcaagtgctctgctctttagtatgtaattttcttggcattcgaaatgggatgctacctttcttgataccattcctgggaagcagcataggttcctttagaaaccttttaacacataccaggtgattttgattctgataattagttttttttttttttggctgtggtggtaaaatatgcataaaatttgatgggtttgtttgtttgtttttttgagatggagtctctctctgtcgcccaggctggaatgcagtggcacgatctcagctcactgcaacctccgcctcctgggttcaagcagttttcctgcctcagcctcccaagtagctgggattataggtgcgtgccaccatgcccggctaatttttgtaattttagtagagacagggtttttccatgttgactaggctggtctcgaactcctgacctcaggtgatccgcctgcctcggcctcccaaagtgctgagattataggcgtgagccaccgcgtccggccacatttactgttttgatcattttcaagcatgcagcacagtggtattcagtgcactcacattattgtgccaccatcaccatcatctatctgcagaacgttttctttttcttttctttttttttgaaacggagtttcgctcttgttgcccaggctggctggagtgcaatggcacgatcttggctcaccgcaacctctgcctccctggttcaagcgattctcctgcctcagcctcctgagtagctgggattacaggcatgagccaccacgcctggctaactttttgtatttttagtagagatggggtttctccatgttgatcaggctgatcttgaactcccaacttcaggtgatccacccacctcgacctcccaaagtgctgggattacagatgtgagccaccgcgcctggcgctccagaacattttccatctttcttctctctctcccctgcccctggtaactcttctactttctgtctgtctgaatttccctgttctggatatctcatgtaaggagcatcatacagtagtcatccttttgtgactggctaatttcacttagcataatctcttcgtgcttcatgttgtagcatgcgtcagaatttccttctttttaaaggctgcgtaataatccattgtatgtatatcccatgttttgtttatccatctatttgttgcttctacgttttggctgttgtgaataaagatgatatgggccgggcgtggtggctcacacctgtaatcccagcactttgggaggtcgaggtgggtggatcagttgaggtcaggagttcaagagtagcctggccaacgtggtgaaactccatctctactaaaaatacaaaaattagctgggcgtggtggcatgtgcctgtaatcccagctactcaggaggctgaggcgtaagaattgcttgaacccaggagttagaggttgcagtgagccaagatcgcgccactgcactctagcctgggagatggagcgagattctgtctcaaaaaaaaaaaaaaaaaaaaaaaaaaagccattaacgtgcacatacagatatatgtgttcaaatccctccttccatttcttttgagtttatacccagaagtggaatcactgtatcgtatggcaattctatatttaattttttgaggaattgccattccattttctacagctcattcattattttttgacctggaaactaatgtatctttccaaaatgattgcactgacttatgtcccttcccttgcaggtagaatgtctttctgtgagcctcctctttggtgatggtgttctttcaacatatctcatatttgaatgtttacactgtaatgtgatagcccaattaagagtggagatgctgtcacataaggcaccgtatgataagtgtcagaagagaaacacaagatgctttgagctcccaaatagaggggaatggaaaaagtttcatggcatttgagataatctttgataaaggagcagaatgttggcaggtggagatgtgggggaggaggatccaggcagtggtaaggaagggggctctgtgtcctggggagaaatagagaaagtcttggaaagtaagttcatgtcaccttacagggccttgaatgtcaggcgaaataacttattcaacttcgtaggtgatgagagctgtggaaggctttgagcaggagagcaacatggttatagctgagtggaaatcatttgagtccagaagttgctggattaccatatggagctggagactatagctgcagaaatcgtgtggctgttgaaataatctagtggagagggctgttggggacatgtacagttagttatcttattttcattttcctcctgttgatgtaatttctgtgaccagagtcttgttctattttaatctgcaaagcatgctgttcagtatgacatgtaataaatgttgaaccctctttggggagtcagtcaatcatgaagacaattattttgacttgagacaaagaaaatgaaagtcctgaggaaaagtgttcacatttgctattttaagctgggagagcaaatgttctcagaactctgcggtcccttggattgggtgcagtttgctctgctgagcgtgagttggcagccctgcctgcttgaacatggctgccgcttgttgttcaggttgagtggactttcctggtggggccgaacacccctcgcatttcggcagcacccacgtgggcctcttgttcacaggagtgtcctgaacagaacagtttctgtaagaaagaagccttcataaatatttgttaaagaagtttcaggccgggtgcggtggctcacacctgtaatcccagcactttgggaggccgaggcgggcggatcacgaggtcaggagttcgagaccagcctgaccaacactggtgaaaccccgtctctactaaaaatacaaagaaaaaaaataaagctgggcgtggtggtgtgtgcctgtaatcccagctactcgggaggctgaggcaggagaatcgcttgaatcctggaggtggaggttgcagtgagccgagatcatgccattacactccagcctgggggacagggtgagactccgtctcaaaagaaaaaaaaaggagaaagaagttttctagctagaaaggagaggctaagatgtctgaaggcttaaagcggtgcccttgtgccttgactgcttcctgggttgcccaggctgacctgcgggtcccctgtgggcttcactatggctctaagggaggtggagtctgcggtgtccacaccccctgcactctgaaggaccctccttccttgagagaagtccctgcgaagtcctccttcagaagtgttcggggggtgaaacggggacgcatgtcctgcacatccgaggctcaccgtatgggcccaggctcctttctgtcattgataccaattgaccttatgtgtgctgaggacagtctttggccctggacccaggatgtttctgaggttacaagtccagcttggtggcaaaccgataaggcccatgaaggctcgccagctccacaggtgtcagacgggcctcagggcaggagtgtctttctcctctccttgtcctgtgatgcaggtcacttcccatgatgtccccagtgaatggcccgggctgggttgcctgatgggtgctggcctgtgggaatgtactccttaacaaggaggaagagccaggtgtgcccagtggccaagaacatgaacccatgcccccttgcagggcttcaagtagatcaggcagctggggcagatttcttaaggctgtggtcagaaatgagtactttttttttttttttggtcatcataaagcagtacaggaaaagcacttaaaatatatttaaggcctttaatttataatgcattcttaaataaatgttctttgtctacctaaattaccatggactgtttcagaccaagttcacagaaggtattttttcattttttgtgccatactttggtcattttaacaggcagacaagaacagcttttgatgatgagagaatcattaaagattctgttaagaaacctggtattataatgagcagaacagaaaggaacttgagtatatgataaattagttaaccagattatgtaagttgtaggaatagaaattccctaaccagcccaatatgtattcaaattaaatacgtattcgagagggagaatatttacttattattgccatgcatattatagaaaacttctcaagtcaggcatcgttgaattttcaatttaaaaactagtttgaggcataatgtaataaatctgttttgcatttttattttcagtttcccaggaaagatttcagttatagatggtgtattatcacaatttcaggagcaacagttgagatttgtgatttctattaaccaaagccttttgggttggctattcttgttgaaaaacttaattaaaaattattttttactgcttatttaaaacatttttacctttttcatgcaagttctctgtcttcaaattataccgtgtttcctttactagaaatgtctgtatttagtgaccgaagattgcccttgtcttctgttcttggccagttgccactgtccctccccctcatccctgcaccgttggttctcttgaccctgtctgtaatggctttatattaacttttctctttttgagttgatccgctgaaaaattttaatggtggtgggattaaagagatccccacttctttgtcatttcctttaaaaatattttacaattttctccttttctacaaggtttttttgcatcaatataggaacaattatggtgcaaaccttttacaacaaactctattcctgcattgtacctccacaccaccagggtaaatggtaaaactctgagaacttccctttttctcaggctgttgtttctagagatacattcattataaatcagtgttgaaaaagctcctacctcaaagtctttaactctgtatatgtttattttgtgctctctcttatcttccaaacttattagaagcaaaatcaaggttgactgataggaaattagcaggatccctttccttcccagctgggaaatgggtaataagcatcagatgacatttcatttacttatttattattatttttagaaacagggtctcgctctgttactgaggctggagtgcagtggcacaatcatagctcactgcagtctcagctcctggtctcaagccatcctcccatctcagcatcctgagaagctaggactataggtgcatgccaccatgcccagctttttaagtttttttttttttttttggagagacagggtcttgaacttctggcctcaagtgattctccccgcttggcctcccaaagtgcttagattacaggcatgagccaacatgcccagcctcatatgatatttcaagtagatctatgagtgatcattccatgattttcttttttaaaataaaaacagtgacataggtagtccttgactccagaataccaattacaagtgttctggatatatggacactgcatcttatcatctcccccggtcctgcctctggcactgtgcccacccatgcccaatccttcctaaaagcagagctgacacgcaacgtggccaggacctttcctctccggcccgacactgctggaggcattaagggaactcccgggcctaccccagctgtcgtggtgacctctgatgctgctaggttcctcataatggtgcctgtttttcctatttccaggagcttcaacctgtagaacccttgaccgtactaacctttgagaacactgcctgtgttctcaacatcaaagagcaaccttgggagtctcggactgggtgaaacgagcactggggatgttgaactgggcttcagaatatacttgtcaacagaaatgaaactaaatagcagttaggtcttgttcatagtgttgttaagcttcatcgtggtgaaatgggctttccagggttgacttgagaactcttccaccatgtaatagtggaaaatgctttggggtatgaagtattcatcaatatgagagtaaatatttggaatataaacctgttcatactgtatagactaccaacgtgaatttcatctcaattatgaaagcattctgggagactatgcttcttcattttattttcagtatttctttttttccttcctgtaatatagcaataagaccaacctcttagttaaataaatttggccaggtacagtggctcatgcctgtaatcccagcactttgggaggccgaggcgggcagatcacctgaggttaggagtttgagaccaacttggccaacatggaaaaaccccgtccctactaaaaatacaaaagttagctgggtgtggtggcgcatgcctgtaatctcagctactcgggaggctgaagcaggagaatcacttgaacccaggaggcagaggtggcagtgaggcaagatcatgccactgcactccagcctgggtgacagagcaagactctgtcttaaataaattaaatacgtaagtaaataaataaattttagagaaaaatgacttgtagtcccgaaaccccagcaagtcaaattctttgcatctgacatccagacactgtgtattcctactcgttgtgcagaagcaatttttaaattctttaaaaaaaaaacaaactttaacatcataacaaattgagtcctctgcatttcacagtcttcatgtttgtgatttttgagtgtagactgttctaggcagcagatatgctacagtttggttaacctttctttgcgtttatagcctttttattgcttgtgtttatagcctttttattccttgggatgatttcccaaagccaaattcctataagtgacaaattatgggtatttatggtattggtccacattgatttctgtgtgtgttgaatcacattgccatcaaccccagcaatgtaacattgactgttacttttttttttctgagatggagtcttgctctgtctcccagactggagtgcagtggcatgatttcagctcactgcaacctctgcctctcaggttcaagggattctcctgcctcagcctttcgagtagctgggattacagacatctgctacgacgcctgggtaattttctgtatgtttagtagagacagggtttcaccatgttggccaggctggtctccaactcctgacttcaggtggtccacctgccacagcctcccaaagtgctgggattacaagtgtgagtcactgcgcccggctgacttgttattctactttcaaaaagatgatctccagaaaaatttcctgggccattttaagaaaaattattgattataggcagctgttttaaattgaccagaaaagtgaggaagccagagaaatttgcttgtacaagtaataaaaaagaacttggtccgtctaattttgagttggtattttatcaagtgaagtagatttaatgagatgtctatgtttcttcagtccctcacctaagccacaagttgtatacgtgtcacacacgcaaaccccggcagggtgtgtcagcaaccattcacaagtaagatgccatgctgccagcccttgtcttccaataattatggttgccaattaccagacaaccagactgttcttttttttttttttcgagatggagtctcactctgttgcccaggctggagtgcagtggtgcaatctaggctcactgcaacatctgtctcccgggttcaagcgattcttctgcctcagcctcccaagtagctgagactacaggcttgcaccaccacgcctggctaatttttgtatttttagtagagacagggtttcaccatattggccagactggtcttgaactcctgacctcgtgatccacccgcctcggcctcccaaagtgctgggattacaggcgtgagccactacgcccagccaagactcttcttacatatgtttatttcccctcatagaagcagccagctgacttatttagagcaacctgtcagagtgcgtgggatcgtagtctacgaagtgatgtcttgtgtagagcaatggtgtattcctgtcaaatttcctgctggcatttcttggtgttagtgttttcttatccaaaaatagggcttgcatgtcattaaaaccttcgttgaagcaattaataaaagattctggtaagtttctggagacattctttaattattcaaaactctttgggcacattcttcaagtagcaacccactttgctgtaccttcatccagccccaattcctgtctaattcacaaccatgtcatgcttgtttcttccaaatgccttgtggaaatccagctatgatatggctctaacagtctccttatctcccagcctagacatctgtcaaagacagaaaggagatgattgtggcctgatttagtcttaatgaagccatcttagcttctagtgatccttgcttcatttcctgagtccttttatttataacagtccatttggacatagtcttttagcagtatattttaatttcttgaactacacaaaaattaatagattctttagttcattgcctgtttattttctagatggattttcttttgctttatcatgctctataatgcattcttcatggatttttgtattgctgaaaatttgtatatgaataattttatttttattatacaccattttattttattttctatttattattattattattttttgagacgaagttttgctcttgttgcccaggctggagcgcaatggcacaatctcggcttgttgcaacctccgcctcctgggttcaagcgattctcctgcctcagcctcccgagtagctgggattacaggcgcctgctaccatgcctggctgatttttatttaactagtagagacagggtttcaccacgttgaccaggctggtctggaacttctgacctcaggtgatccacccgcctcggcctcccaaagtgctgggattacaggcgtgagccaccgtacctggctcctattttttaaaatttcttttcatagaatacatttcacattatatgcccagtgttccattattggaacgctaagcatgtggaagttatttatatcttgttcaaagtcattgccaaggtctgattttgcagttcaaaaaattgcaacctcaggcataaatgggttagtgattcccacggtgggaaaataacaatttattacttagaattttatttttgtggacagattattttagatcaagtaaaacacatttgagaattaagtctcagtttagagtctgtaatattttgatacatcaacaagggggacctagtccttaaatggaacttctctatattcagaagctctccaagcctttctttctaggatttagaaattcataatgtgagagatcagcatctcctaattttaaagtgttcctagtgtatgtaaccatcagtggcgggtatctactgaacagtgaggaagttttcaaaaattaaacactgtctgattttctgcagagtttttattcagaatgtgcttggacttcccagccccttctcagctttcttgtttttggcagatgcttcaagtaaagctttcttcttcaggtacctacgccatagggtcgttgtgtagaatcgggagtgttaaatgatgcaaataagtgcttcaagactggcccttcttattatgtaaaatcactttgtgggaaagtgaaatgatttgagtgaaaaacttgtatttctcaacagttacaggaatagagacactgtgcttggatgttgcatttcagaccatggcctgtccttttggctggaaagtgacttgggacttagccctcaattccactccactgtcctttttcccttttgtggtatgcacctaaggttgctcctcgatctgcctatttaaaccaagctgtgatttacatgggaactgagcatttgctttggggaatatatgtattcccccgggctgtttgtttgtttgtttggttggtttttgcccactagtgtctactgcgtgtgtgtctcagtattacgggaagctctgcagttttaaactatatttatttaagggcagtgagtttgcatgtgccctgggtgtgtttagttctaacccagacttcaggcggggcatccagagcgttgttggagcgcctttctgattgcacaaggaagggagggcagtgggtgccatagtgcctttcttttgtgggtactcagtgtattctctgatccgctgtgtcagtagagtgtttgctataaatccttgctaatggaagggagaagggttttaagacatttacaactttcataatttagacccataaaacgactaccggccaggtgtggtgactcacacttgcaatcccagcactttgggaagccaagatggaaggattgctgccccagaagttcgagaccagcctgggcaacacagtgaaactctgtctctacaaaaattttaaaaaattcgctgggcgtggtggtacatgcctgtggtcccagctactcaggaggctgaggtgagaggatcacttgagcctgggagttggaggctgcagtgaactgtgatcgtatcactgcactccagcttgggtgacagagcaagacactgtcttcaagacatattagtagacctctttataggtctagtaacaattctagtacacattttgataatttgataggttttctcctgaggcatcctcagtagcttagtgatttgcccagcagcttgattggcacttttgtgctcaaacaggtgagaggtttggggagactttgtgattgcatctaaaatgactgaatcataaagtcgctggatggtagagagggtgacggctttagaaatcatcatgtacaagagggcccttggcatgggagttgagaccaagcactctggcaccagcctgtctgcatctggtcccatgtctgccacttacgagctgggtgactgtgggcaagttaatctcttgtgtctcagtttcctcatctgtaaaaaggggtcagggtagtgtcagtctaatggcggttgtgaggattaaatgagttagaatttataaagctctgagaacagtgcctgccatggagaaagtgctacataagtgctggctaaataaaataataatacttactgtgttttcacattccatgaatgagaaacctaaaatccaggaaagaggaagttaattttacaatacactgaaaatgtcaaaagttaggattagaaccaggcctctcttggctagtgatttttctctttgtcatgctgcagaatgactccagtctggtggtcaacctgatagcgcctaaataattttccctccctttcagcaatctgcagcaacaatgtgctgttcataatcattaatttctttagtagacattgtttaattaaatgccttatcaaccaggctgacatttaaactttctcattttcccacaagggatttcactattttattacatacttttttccttgacatttcactattgtaattaatcattaattctagttgaagtattccaggataaggtaccctttacacatctgttgtattttatagtatcctttggcttataataatactgcatagtttatttcttgaagaatattgaaactgttagaaaattgtgtggtctgctttttaatggcttaatggaaattgcttttcttttcccaacttgaaggaagccctatcatttctaatttactgaatttggtaagctttaggaaatggcttcctttttcataaagttgtataagatgatgatgttggccaggcgtggtggctcacgcctgtgatcccagcactttgggaggccgaggtgggtggatcacctgaggtcgggagttcgagaccagcctgaccaacatggagaaaccccgtctctactaaaaatacaaaattagacaggcttggtggcgcatgcctgtaatcccagctactcgggaggctgaggcaggagaattgcttgaacctgggaggcggaggttgcagtgagctgagatcgcgccattgcactccagcctgggcaacaagagcaaaactccatctcaaaaaaaagaagatgatgttattcattccataatagatgtctgtggatgataacacaggatgcaggtaacatttacattttggcatgtatttcttaagtatcattttcagaatgtccaaaacttcagcagaaaatggtagagggcaggagaacttttgactaaaaacttccttaatttttttttttgagatggagtctcgctctgtcacccaggctggagtgcagtggcgcgatctaggctcactgcaagctccgcctcccgggttcacgccattcttctgcctcagcctcccgagtagctgggtctacaggcacccgccaccacgcccggctaattttttgtacttttttagtagagacggggtttcactgtttagccaggatggtctcgatctcctgacctcgtgatccgttcgcctcgtcctcccaaagtgctgagattacaggcatgagccaccgcgcccggccaaaagttacttattaaataatgaggctgttgggaatatgctgactagatttggaaacaaacaataattctttacagtttattaaagaaaatacccattggtgtttatttcttttacatagctttccagacacatttttatttattaagtcctgtcattttctcctgaactcaaggaggcaagttatctctctgataaggacctcagcaatcagctgaattacctgccagaggctataaaggggcttgtctgagccagaaattcacagcagtgtctgccagtgagccccaggactttgcttctcgtttccaaccttaagttgatcctgctgtctttgtagaggtaacatctacttgctcctatatctgcacctgaaaagcatctcaacatagcccaaaactggaagcaaccacaatgtttttctgtaggggaatggataaactgtggtatatccatacagatgggatattattaagcaatacaaagacatgagctagcaagctacaaaattcatggaggccaggcgcggtggctcatactgtaatcccggtactttgggaggctgaggtgggaggatcccttgagcccaggagttcgagatgagcctaggctgtatagcaagacccctccctctctagaaataatttaaaaacttagccatggctgggcactgtgggccatgcctgtaatcccagcattttggaaggctgaggagggcggatcacttaaggccaggagttagaaaccagcctggccaacacagtgaaaccctgtctctactaaaaatagaaaagattagctgggcacggtggcacatgcctgtaatcccaggtactaaggaggccaaggcatgagaattgcttgaacccaggaggccaagattgcagtgagctgagattgcaccactgcactccagcctaggtgacagagccagactccatctcaatctcaaccctccctgctccgctccccctccccctttccccctccccccacaaacttaggtatggtggtgtgcacctatagtcccagctactcgggagtctgaggctggaggattactgagcccaagaatttgaggcagctgtgcactatttcaggcagaccaaaagctgcctctcacctgcgtatttaattttcttttctctattttcgcacttctattagtcggatccgctattggcacacctttcagtacatggtggatgcttagtaaataccactggatgcacaaacgtgagtcctacccacaccatgccatctgccatcactgctatttaagaaccttttttcagggactagttgatgtctcagttcctcagtgaggtggcatccttatttctgaggcttttaaaattcgtttaatacctattgtcagaagtaaacatgttgccttgaacagtcatctctgagttacctgttctcttgcctgatagattatgcatctcataaagacaaaacgatattgtgccacattattactttgtgtcctatagggtgtgaaatgtagttgctgaaacataataggccctcataaatgtttgttaatggtgatgatctcgattatggtgacacttgaatgatagtatactttgaacattgggtttgttattttcaaaggcattgagtaagcaaagccagtaattcactgcatcctcattatgggccaggcaagggttgggtgctttctacaaatatttggagaggctgactggtgtcgattagagaagactttccttagtgagtggaagagaatgatgtgtgttaagtcgagtgaggttggctgcagactaaaaaatgcgcctgtttacattgcagtgaccttgttagtgtgggaattcagaggggctggaagctggtggctatcttccttacatttaattcaccctgaccttttccttagaggtagaatgaggggtgagctaaagtttaaagtttgtactctcagaatcattgagaaattgacatcattagaatgggaatgattggagatttttttctggtttcctgatttttctggagatcaaaaagccttctcttctggtaattttcacctccacttccattctacacatttttgtctttgcatatctgtttaatggaggatatgtgctctaccgaatcagtgaaagtgcaaagccaaagtattgacttagattgtttttagaacaaggttggagtagaaattaaaaattgattggaaaaggcatgccactttttcttgcgaggagctgctgaaaacaggcactcacgacctttggcacatgtgcaaaacatggcagagtgtccctcttttcttggggaagttacctaaccaagtaagtgcttggcttgtgtctggtggttttacaactgtcattttagctaatctttacggagaccctcagaagtggagcaggagcagtgcttctcagaccagagcctgcatcagaatcacctggaatgcaaccttcaccccccccccctcccctttgtgattcagtggggctgagctgggctgagatgaagaattgtatttctaatgagctcgcaggtgatgtggatgctgatttgtgggcacattttaagaagcactgcagtagagagtaggctttctctccatcttttaggtacggagaatgacttctgggatggataagtgactggcctgatgttctcacagttcctaagttgagactagagctgtctctagcacttacgcaagaaaagtgatgtcaggctcccaggtaagggagacccctgccctcgggactcccttggaaaaggcttggaaaagaggagaaaggcctgtaaagcctgtgaagtagaagctaaatgtaaacaacaccccagggaagatgaagtgagtatttttttcctaaaccattggatcaggaaagtctttctgggtgaggtgacactgggactggctagagaagtgttttttttcttttgaatgtaagtgttttatttttctctcccagtcttttatctttttaaaattgagattcatagttgtatatatttttgaggtacatgtgatattttgatacatgtatacaatgtgtaatgatcaagtcagggtaattgggatagccattgtcttttctttgtgttggggacattccaattctcttctagctcttttgaaatagataacacattattgttaactataatttccctgctgtatttttgtacccattagccaactcaaagatggtgttttagcaggaagaaacagaacaggctgggcacagtggttcatgcctgtactcccagcacttcgggaggccaaggtgagcagatccctaaagtctgggagttcaagaccagcctggctaacataaccagactctttcactacaaaaattaaaaacctacgtgggcatggtagcaggtgcctgcagcccagctattcaggaggctgaacgggggaggaacgcttgagcccaggagttagaggttacagtgagcagtgagctgagatcgcgccactgcactgcagcctgggtgacagagcgagaccctgcctcaaagaaacagaacggcaaaagcttagtgccaggaagatacaagagtgttgaacagcagagttcagctggattagaagatggtttagttgaaaggagagacatcatggcagatggttgaaatgccttgctgggaatttttacatttaactcggttttgattggactcaggtgtttgagtagaaaagggatatgggtagaactggacatttgaaataacccctatgaaaatgataaagatgagaaaatttctcttttgctctgagttttccttattttccagagacttgtcagggttatttaagataacctatttaattaaaaaaattgttaaaaaatatggttgccaagaaggaacagtgaagcgagaatcttgagctctgcagttaattctcatttccttgctttgttgttgaaataggggtaccctgctcgtagacagttaatagcctggtctcctttttccaaatgatcaaacaggccgaacagttcctcctctgtttgaagtgtctggttgatgtaaaacagttgatctgcagttgtttcttttgctcacagactttttggaaataagcaaatccatccacacagatagctgtttttgaactttctcaaaaccccttacctaaccccttgtgagaagtcaaactgagctgctttgcttttgaggagggccgggctggcagcttttctagtttatctccaccccagcctcccctggggccagctcctggcgtgtggctcccccgggacagaggcacaaggtggctttgtggcagcttccggctcataagagcagagccagatgcacggagctgttggagattgatcacacgccctttgccctttgctctttgctctcctgggtgtctgacacttgattttttgccctcactcaatggcacatccacacttctttgctttcaacatggggcacagaagtggttggaggacccagaacccagccctttggcttcctgcagctctgccacttggacttcttctttgaataacacgtttctgtgagtttttcttaacctggaatttttcagttgcttgtatttaaaactggaagaggggaaacaaactcttgcaaaaagtttctcttcatctacccggcttgattgaaagtagttcctcttcactgtgatttcatctcactcgatttatgctctcagtggggcaggagtagttggtaggagtgtgtgcttttagtagattaaattaaaaattgtttaattacttcttaatgaaacatagtcttcttaattacttttttttttcttttttaagagatagggtcttgctttgttgcccggattggagtgcagtggtacaatcatagctcaccacagccacaaatttctggtctcaagtgatcctcttgcctcagcactgcaagtagctgggactgcaggtgcttaccaccatgcctgggtagtttttaaattttttgtggagacggggttttgctatgttgcctagactgatctcaaactactggcctcaagtgatcctcctgcctcagcctcccaaaatgttgggattacaggcatgagacactgcccctggcccaaattacttcttaattaaacatataggtatatggtacaaaattaaaaaggtccaaaagagcatctgatgaaaagccagtccccagcctgccttgcttttgtcccaggccaggctggccgcctcactggagtcagctctccttccagttacctccctctccttccagagaggctctttgtgttcacaggaatattcacggacacatagacatttttagatttatggaggtgtaatcacaaatcgtaactttgacctgtttcaggtgtacaattcaaaggtttttagtcagtttacagagttgggtgaccatcaccacggtccagtttcagaacatttctatctccccaaaaagaccacaattctttgtgccctttgctgttgatcgagctccgaatcccagccccaggcaactactttctggatatttatcctcctgataaagccttggctggatattacatttaataggatcataggtttatggtgtcttttgcatgtggctcttgtcactcagcaaaatgtttgcgaggtccatctatgtggcgtgtgtcagcattttgcatctttttgtggcagaacaatattccctggtatggatagatcgcatttggtttattcactcaccagttgatgactatttggattattgggttatccacttgttggcccttttttggctgtggacatctgcatgtacttctgtgcagacatatgttttcatttgtcctgggaagatacctaggagtggaattgcggggtcaccaggagaagggtttgctgggtttcatgccaaacttatgattacaattttaagaaactgccaaaatgctttttaaagtgtttgcagcattttatattccttccagcaaccagcagtatatgagtttcagatttttcacattcttgagagcttatttggaagtcctagcaggggggagcacagctactcgtatacccttgaccgaaaaccggtcctcctctatcggggatggtcgtcctcttctgccaagcacacagttttggaagggacacacatggagtggtgagggaggaaaggaacacccgcctagccagccaggttagctagatcaaccctggcaatcacccctagcccaatgaaccctgacgatcaatggggtgacagatgtcacagccagatggccctcacatccagattctccacattcttgataacacttgttattgtctgtcttttttgttataaccattacagtgggtgtgaaatatcttattgtgtgtataatttgcatttcctaatgattaatgatgttgaacatcttttcatgtgcttgaccatcttcatgtttttgcagatttaaaatcttcctattatcagttttaaaacatgaggtaataggtaacttacagtgcctctcaccatttctactcctttccctgccagttttttagctgcattatttctacattgtcaggcattatataatattctgtggctgttacaattatttttttctttctcttaaagtataaatggttgtaaagtttactaataattgtttttcattctttcaccatttaccttttgttttgctgaagtttatcctttagtagtttttttgagaagggattggctaacattcttctgaattctcacctgtttaaaatgtttggctattggctgcatgtggtggcttatgcctgtagtcccagcactttggaggccaaggcagaaagattgcttgaggctaggagtgcaagactagcctgggcaacatagcaagactttgtgcatactaactggtggtggtggtggtgcatatttgcagtctcagctacttgggaggctgaggcaggaggatcgcttgagcccaggagctcgaggttacagtgagctgtgatcatgccactgctctctagcccaggtgacagagtgagaccctatctaaaaaaaaaatagcaaaacaatttggctattatagttgaatgaaaatttgcttgtgatgaaagttttgattctgttacaattctttgaggatgtttttggcatttaagccttggatgttgctgtggacaattctaaaattttgtcccctcatactttatttgaactttttgcctagctgcccaaatgattccttcctaaagtttgaagaccagctatgactcaggaaatgagttgtcaaattatctttgtggtgatcattttatggtagttatccctggaataggatatcttcatttattatgcacaagtatctttaatttctaaaatgttttcctgaattatgccttaagctttttttttcctgttctattctttgatttttgtttctttagggataccgattgtgggtatgttggatcatctctctctgtcttccatatctatcagttctctgtgttttttttagacagagtctcactctgtcacccaggctggagtacagtggcgtgatctcggctcactgcaagctccacctcccgggttcatgccattctcttgccttagcttcctgagtagctgggacttcaggtgcccaccaccatgcccggctaatttttttgtatttttagtagagacggggtttcactgtgttagccagggtggtctcgatctcctgaccttgtgatccacctgccttggcctcccaaagtgctgggattacaggtgtgagccaccgtgcccagccagttctctgtgttttaaatctattgcttgcttttctcagtctttcccattaggtccttcatattttcaccagtgcatatttccttttagctgcttcccatttggcctgtattttggtgatattttcattcttccattttgtcctcctaaggtctgccacccttattctttatttcctgctaatgtcttcccatagcttccctgaactcttgtaaatccttttatgtttttgtctatggaatcagttatttcatgaagttttattaatttataactatgtttggacaaagctttaatctgttgcatgtaacattttctttggatgttcatctgtcatttttcttttttcttgcagcatctttgtaaaggtttttttgtttgtttgttttttggttagtaggtatgaagtagctctttgcaggagcctcagtgggccagcagacagagccgtgttccatactaataggaattttcatgacttgaggttgtgtgtgtgtgtgtgtgtgtgtgtgtgtgtgtgtgtgtgatcctttcaacctttgctattcccttatttgctgaaactttggtagtcaaccttggtggtatgtctaatgcagtctgtctttttcatcttgcctcagcgacagactgcttcctacaaatatggcttgcctgtatggtttctcatttcatatcaatctcactatgtccagggaagctgttactgtgaatctgcacacctgtccctgttattccaagaaagttatgactggtttgctgcttatttgaagctccgccatttttatctgagatctgtagccatgagcagcctctccaagcattttccttcccttctttctgaccttcactgcagcttggcacatttttgttacattttctggtttggggctacagatgtctcccagtttcctcagggatggaatttgtgttttttagtttactgcttattgcttttggatgaattgcaagaggaagtccttataagtcaggatactaagacaagacaactctagttttttaccttttctctggcggttaaaaatcttgttacttctttgttgttacttttttaaagtaatttctcaaatagagctaactaataaagtagttttgcaagcagcttttaactttaaggtctggaataatcactttagtaataaggtatcacaaggaaagaaatagtctatattttgactattcctcaagaatttcagaagtcaggaagttaatggagataaattcagaatagagcataggttaatatttatacactagaggcctttcggtttgttggatttgtttatctggaagacggcattttattactgggcttaccagttttgctatcaagcatcaactgtggttacccatttatgacttgccagcgttcctgagatgttcccttagcgttcttaggatgctcaactcaaaactcttggctggatttatgattgaattaaacagacttttccatgtacagcaacagtctgcatgcaagtatgataacagagagaaagtatgacatactttgttcaagcatcagtatccagaagtagaaataacctagacatgagatcatttgagaactaaagagaaaggaagttaagctaccaagtatctgttaatgactaactcaattaaatttttaaatgccaaggtgctaaaaattagaatatatatttatctggggattttgggcaagagggagagaaaggattcagttcagaggatgaggagtcttgctttttgcttaggtaggacaaggagaagatatctgcagggagggtctgagcacctttaggctggggtgaggtgggagagtagagcccttccttcctgccgtcatcggctccctggatgggcatcaacaccatagccaggtccatgcctgcttgactcagagtgacaagcccagctatagcccagtgtgaattaccgtgcacagggcctgtccctgctgagcaagtgcagggcagaaggggtggggtgggggaggggccacaccaaagtacgaaaagtgcatggaggggctgggaatggggaaggccaacttgactgatggcatagttttctctggagattgcatttatttttaaccatgagacagtgaacagaaaacatatatggaatagaagtaattttgcctggcttgtgaagattattttggacacaactgacttcataatgaatatactgctccccgaccaccacctccacacacacacacacacacacacacacacacacacacacacacacacacacacacacacactttgattcattggcccagtattgaggatctctcttccacttcggtgaagggcactaggctgggattctagattaaccaggctggtctcatctctcaaggctaatgagtgaatgaaccaaagcagagatcacacaaccaaacagattagaaacagatgcttagaaaaagcttatttgaggcagaagtgagaaaggcacttatataacagacctgtggaatcaggcattcaaaaaagaaggggccagcgtggtggctaactcctgtaatcccagcacttggatcatttgaagtcaggagttcaagaccagcctagccaacatggtgaaaccccatctctactggggagaaaaaaaaaaaaaaaagccgggcatggtggtgggcatctgtaatcccagctactggggaggttgaggcaggagaatcgcttgaacctggaaggcagaggttgcagtgagccgagattgcgccattgcactccagcctgggtgacagaacaagactccatctcaaaaaaaaaaaaaaagcagttctcagatcttcactccatatgtcatctggtaacactggggttctgagacagacagtgttagctccagaagcattgcctgtcttagaacccctatgttaccagacgacataaggagtgaataaaatcttcaaaaggctttgatggaccgtaggtgaggaaggtgagtgtgggagaagtcaggagtaaatggtgtttcctagacagtgatcaggtgtttcctagacatgttcgatggaaggacacgcccttttaggccctggtgatttgagtcgctgtggatgtgatcccatagtttctgatttgctgacctcagggccagcccttgtgtctatggtgacagcattagaggtttcattgcagaggaagtaaggaattcattaggaaacttctggggacctactcttaaggaaaaggctgagaatgagttagggaagaaaactctacaaaatgagatttggaaaccggatggttttcctgaagagaaggctttaacactttcctgagttttgtttgtttgtttttgtatttgagacagagtcttgctctgtcacccaggctggagtgcagtggcacgatctcggctcactgtaagctccgcctcccgggttcacgccattctcctgcctcagcctcccgagtagctgggactataggcgcccaccaccatgcccggctaattttttgtatttttagtagagacagggtttcgccgtgttgtccaggatggtctcgatctcctgacctcgtgatccacccgccttggcctcccaaagtgctgggattacaggcgtgagccaccgcgcccagccaactttcctgagttttaaagcagtggtagaagtttccaggtgaagaaagagggcaaagtgctgagccacagtgagccacgtgtggagacctggaggcagacagaggcagcgggaggggagggagaagctgagggatcaggagacagactatctggggaggaaagattttttttttttttttttttttttaaggaaaataactttgttggctgggcacggtgggtcacgcctgtaatcccagcactttgggaggctgaggcgggtggattacttgaggtcaggagttcaagaccagcctagccaacatggtgaaaccctgtctctactaaaaatacaacaattagctgggtgtggtggtgtgcgcctgtgatcccagctactcgggatgctgaggcaggagaatcgcttgaacctgggagacagaggttgcagtgagccaagatgttgctattgcactccagcctgggcaatagagtaaaactgtgtctcaaaaaaaaaaaaaaaaaaaaaaaaaaaaaaaaagaaaaagccgggggtggtggtgcacgcctgtaatcccagctacccgggaggctgaggcaggagaattgcttgaacctgggaggtggaggttgcagtgagccgagattgcgccactgcactccagcctaggtaacagagtttgagattccattgcaaataataataataatcataataataatagtaaaataaaattaataaaaaataaaaaaaactttgttgatactatagtacaatgtatagaatggtagaatggcttcttgggaaagggggaatagttggtggggtgggtggctggaaagaaatgaagggtgactttttctcaaatgtgagtgagacgcagctcacagttccattccttgcaccccagatagctctgtggtgccccttctgtggcccctttgtccagaagtgccccctgggggtctctttttcccatttcttctttctccatgaccctcaccattgggcctgatggttcattttgcttttttggttatacattcacctcctttcattgattctaatggctttcaccctgaacccatagcccagacccagcctggacaggacagctcccagacaggacaacccacaggatgtccttttatagccccagggagcattccaaagcacactcacacctccccctcctacttcctcccttctgccctgatttcaaactttctcatcagtgttggactttctttttcgtttttctatcttttctttttttttgagacagagtctcgctctgtcgcccaggctggagtgcggtggcgcgatcttggctcactgcaacctccgccttccgggttcacgccattctcctgcctcagcctcccgagtagctgggactacaggcgcccgccaccacgcctggctaattttctgtatttttagtagagacggggtttcaccatgttagccaggatagtctccatctcctgacctcgtgatctgcccgcctcagcctcccaaagtactgggattacaggcgtgagccaccgcacccagcccagtgttggacctttacctcctcttggtagctaaccatttttaacattgggttagtttttccacagaagtagattttatagcatcaccttttgatttccattgctgctgtccagattggcacttcaagcatgaattgttacaggtgatttgtaactggatgccccagcccctgccctcccaaccctctttctttagttatatatagtaccatcctcaggctcatttttctgaaattgttgttgttgtgttgttactcttccctcagtggctcctgctgcctgcagggtaaagaccatatttttcagccaggcatttgaagtcctctaaaggaggggtccccagatcctgggccgtggaccagtggtccgtggcctttcaggaactgggccgcacagcaggaggtgagcggcaggcgagcatcaccacctgagctccgcctcctgtcagatcagctgcaagcattagattctcataggagcacagaccctgttgggaactgcgcatgcgagggatctagattgtgcgctccttatgagaatctaatgcctgatgatctgaggtggaaccatttcatcccgcaaccattgcctctactttgtctgtggaaaaactgtcttccacaaaacaagtccctggtgccacaaaggttggggaccgctgctctagcacctgacttcaaatcatttctaaaatacatcttgaactctctggctctgattctcactcttttttgcctgtgccatcgtgtttctgtcccgtaactctgtggatgccattccacttcccaggagtgccttttccttgtctgtctcctgtctctttccaagtattttccaacatttgagaccaacttgagttcaattctcaccttctccatgatggaaggcttccctctcttttaaccacttcatctcacctggaaatctcgttcccttatgtccttctgacactaaatatgcagccacatataaatatactggctgagtggtccagtcgttaagcagccagtattgacctccactccgtgtgaggcattgtgcctaggtaggcgctgagctgcaaaggacattcgagattgggttcctgctttaagggcatcacagtgccttctccacacacgtgggctcaaccaccatgatgtggctttgacagccacgagcacagaggggataacacatgtgctctgcaccagatgccaggatgtgacatttgttttcgtttttgagatggagtttcacgcttgtcccccaggctggagtgcagtggtgcaatgttggctcactgcaacctccacctcctggcttcaagcgattctcctgcctcagcctcccaagtagccaggactacaggtacatgccaccacacctggctaatttttgtgtttttagtagaggtggggtttcactatgttggccaggctggtctcgaactcctgacctcaggtgattcacccaccttggcctccgaaagtgctgggattacaggcgtgagccaccgtgcctggctgggatgtgacatttgaactgaattttaaagcagtggtagaagtttccaggtgaagaaagagggcaaagcactcagccacagcaagccacgcatgtggagacctggagccagacagaggcagcgagaggggagggagaagctgagggtgtcattagacaagagtagactatctggggaggaaagatgattgtttttaggaaaataactgttgatagtatagtatagtgtgtagaatggcttcttgggaaaggggaaatagttgggggggtgggtggctggaaagaaatgaattattaggtggttattgtaatagaaatagacactagaaaccaagaaaaatgaccctactctctgttgcctctgtatgagtgtatgtctgcgagtgtatgtctatttcctcaaccagattattagcccgagctctgcagtgcgcgttttacctgtttatctttagaatacccacagtacttagcatgtaactatgtccataaaggtaattaatggatgctaatgatatggtttaggcactgtttatcatcttcccaccagacttcaatgtgtaaaaagtagtgcctagcctagctcattgtagacactgaataattaagaacagactgtaaaacgagaaaggaataaaatatgcaacaatatgcaaaattattcaaaagaataaagtatgcaaaaagtatttgcatgccttgagtgcttaaaggtgactttgtgagtgaaccgatgcctccctatatgtgattcctgtgcaggggatggagccccctgcccacctgggtggggttcaaggtggcacacagcttgggtggtagtctcctattctgatgtgtttttctttctcactgcttcctgcagatattctctaagccgctttcatcatgggagaaatagagcagaggccgaccccaggatcacgactgggggccccggaaaattcggggatcagtaccttggaacgtggacagaagccgcccccaacaccttcaggaaaactcgtgtccatcaaaatccagatgctggatgacacccaggaggcatttgaagttccagtaagttgggggcttatctgtaacccaggagtgtggtaggggacagcctttggtgtgaggaggttcggctcattcccatggccagtgacatgaggcggctggaggtcctgcatgttcagcacctccctccccgccccccaatggccccgctgacccgttctggtttcgagctctccagtgtctagatttatgcttgaaccacccacatagtgatgtcagtggcctcggcacttgaattttactatgaactttcattcaaatatatatatgtaatctaagtgcatatgtatatgttatgtatatatatgtaactggagggaagagtggtcttgtggctggatcccagtttaatttactggtcatagacaattcctctctcacattggtgcttgtgcgtgtgtgtttgtggcaggggggctgtcgaactcaagtcccggttactggcaagaacagtcccgagagcatcattaaagagccacgtgtgttttcatgtgagggaatcaggagagcctgtgcatgcaaccccacagggcaggtgtgggagtatcgaaaagcctccttccgagcctgccatatggcagccctagagatggggaggccctgccaccgcagggccctggacagagcagcctgggggccggaggtgtcacaggaggagccggcagcctgggcccctcagcagctggagccgttggagccgctggaacctctggtgctcctcacttctgctgttcttctccgagcccctgcctggcctctcccagcctcctcctcagatcgctcctgcgggaggatgagaagctgccgcctgcttcgtgcagctggtgcacatcttattcccggcaggagaggaagtgggagtgtctggctggctaagcagcaggcccactccctctcatcggctcagtccagagaactcttaacactcctcggatctagtattttgggttttctgtctggagtatcaaataccatgtctaatattgtttgtggaggaggaagataactcttgaattccaagcagccaacttacaaacaaactctgggagcacacctgtttttaacatagagatgatctgtgtgtcattcctgttggctagaggggctggaatttagtagtcggcattaacgttggtaacccatcatttaatcacttatgggatatgagtcagcgaattatatttatttcaaagaacattgctcagagcacatgaactaacattaaatgtctcaggaaaagataaactcagaacagctatgcttaaaaccaccaatttattgcgcactgcaaacaacctttgtgttttctgattttcttgtggaatttgtatctttcaaggacttgggacagctttgtattttggtgaacaaagctattgctcatctgctaaaatcatagactgttgaggagagcccctgccatgcagttagaattgggcctcctggcacacgtggtccgtatgtgcgccacctcacccacttttttgtctttgttgccagactggttcagtgaggtgtttcgtttcagtgtttcctgttgagcactgtgaaggacttctgagcccaggtttctagcacacacattctattacacggtgtttctgagtgggttggactgtggaactggcaaatgctgctcttgtgtgcactcactccagggatcgttggactgtgctcacctgcagttcttcttgaaaccaaagaaagtcaagaccccattcctagctactatttagcagctatccaggaactccctgcccaagaagtagtaatagaaatgtgtttttatcttttaaaatgatttttcttcataatttctgatggcttatgctttgcatttataagccctttgtctggaaggaacctttctcatgctctctaataaactcctgtgcattcttaaaagccctatcagttttacctggatgcctactctctcaagcagggctttttcttccttcctgcagaccactttactcatatacctgtcagatgcacaagggagcctgggttcaaatcccagcatctcctactgagagttgtgcagcgtgaacaagttatttaacctgtctgtatcgataaaatgaggctaataataaactcgactttatactatatgagaataaaaaaagaggtgacacaaagtgtttggagcaattcttgacatgtagtaagagcttaactaaatagtagtaatgacatgcacgtccaactgcctgcctgttctgtctatatccccagcatctagcatggcacctggcatatagtagctgctaattaaatgtttgctgactgttagagtgagtgtgagtttattttacaagtagaattaatgccattgttcgttttcacatgtctcctccattcatatttttctttttctcttttttttttttgagacggagtcttgctgtgtctctaggctgaagtgcagtggtgcgatctcagctcattgcaaactcctccacctgggtttaagcgattcttctgcctcagcctcccaagtagctggtacgataggtgcctgccaccacacccagccaatttttgtgtttttagtagagacgggcttttaccatgttgaccaggatggtcttgatctcctgacctcgtgatccgtccgccttggcctcccaaagtgctgggattacaggtgggagccatcacacctggccatattttaatttttctagtttggtcagaatctttctcttaacctctgggaaacagatgtattccttaactggctgtagaaagtcacatatcagcatttttattggtggagctgattctgagtcagtacctcatgctgtttaagagcagccacggccaggccagcagcagctgaaaggcatgggggctggctgtgatggcccagtcatcagggattgggaggaaggtgactacagggttgtgagagactcagctccccagtcttgctttaaaaccttgctgtgaaactttttgctgggaattcaaggccaagtgtctgaccctggaaacgtcctttgatggagtgccccaagtgaatgacttctcatggctcagtcacatttgccacgcagctgagctgggcacgtggccagaagtccctgcagtttcctttggggatgactggtgtctttccctgggggttgaatttcctgggcctttgcttattaattttattttaaaatacggaattataggcaaagcagtcatttaaaatgcaaatcccctaaacacttcctggaacaaagaaccacaccatcttctccatggtgtctccgtccttctttgtaccctaaaaaaattattattaaagagatctaccttttgggaggctttggcagttagctccacgatcttttccattctgtagctgtttccacaagcacctctgtggttgaacttggactgtctttttaggtatttcctctgcagagtggaaagttcaagcgcagtatttatagtaaattcttgcatggtgttttttcatctttatgtggaaaacaccgtgcaaataagcttcagcctgtggtttatgatatatgcagctttctcttccaaccagaggttatgaaacagagtgactcttgggcatctgaaagggttaataaggtgcccctatgcccgcccaggccatttccctgatggttcctgggaaggttttctgtgtcccctcctcgtgacccggcgggtaaacaaacacagttcccactgacattagtaggatgaagcagatggtttcctctccaagtgtttattcagtttatgtattttcattagcagtgtttctataggaagagcagaggaaataagacacagccatttttattttttatttttatttttattttttgcttcttttgagcagccctggtaaaaaaaaatgcttggggaagatgctcacaggtgacaaaaaagacacctagtgcctgtcgaagggttagaaggagtggtggccagttgcaggcgggtggacgatggcagaagcccagaagccccccaggagagcaggggcaggagttagttgctgcagagggaactcggcgtctacgaccgtcgtcgcaggaaatgatccttgtaactttctcgtgttgctgtcttgtcactgctgtactcgagcttttgtagctcctgagacttaagtagcattcatcctttgcctgaggatcaagtgtgggcttcgtagctcggggagcctgggagagagcaatgagcctccatggaggggccctgtacaccgggaggtgcctgggcaactcccatggctcatctcaaccacagtcctcggcggtttgttttctgcattagcttctcatgccagaacaccctcttatttgtttacctgcttagtgttggcctcttgcaggtagagtggccactccttggagggcaaggcctcttgttcttgttcgtcatcatatcctacgccgcagcggtgcctgtgcatgaaactgactggtgacagttctgctcggtcgtttaactatacgagagttggtgctgtcctagcataacaagggaaagagcaagtgggaagagcttctgagtcccttcctcgtgttttcacagcgtgaaggtggggctgggattggagtccggcccgccagaccctcaacttacccatcttctgggcactaagagccgcctcctttgtgagattcgcggacttcctctgcctcctactcccacagaggtggtccctgttcagcttggcccggccctcccccaccccacatcctcgccccacatcctcaccccatgctgccctgttcttacctctttctaaacacccacgccatcctcaccccgaacacattgatcaaaatcccaccaactgccaggcctctcccaggcttgtgctccaggccagccttctctcctgacagtgctgatagctcacctccaatcagaccttgaatcatggtctctaatcttgcccctcgcactcattattcctggtgcagtgactcagttttttaatctgcaaaattaggcactggggcctgatgatgttaaaggctacccccaacccctttccttctttggaagtgaggaccctgtgttgacatgctccttgacaaattaactttttgtgactgtatttgtgaattctccagacagatggtaaaatctttgaggaaagaggtttttaatcttagagcaaaccttgaggcccccaaagcctgattagacacagtgggtaccgtgtgtctactgttaaagaaagctatgtgatgagagtgaagaagcatgccacgatttatatgtcccatgccagttgcgggccgcaggaaatgttgtgattggccttatgtgcgtgtggggtggctgttttcataaaactcactgcactccatgctgcactccaggctgaactctatgctgtttgaccatgggaaatggaagacggaaagaaatattttcttgataatacattattagtagaaaattcaagtttaagttgaaatcagagaagacctaaagtttttgagaaaagtaatgagtttgtatgtcataaaagaccacgtaggttcttttctggtgtcagaatcgcctgtgctatcttggagacctaattaggagtgttacaaattcagtcccatacatgattaaacattgatttcatttcattattataccttttgaaatgtaacagttctttcattcctttaattttcactgaaacctaggtttgagatcaatagggagcttattctctgagagctctggttcagagtaaggtgtccactggtgacagattctagagctggctccataagctccatctcagaaaaagggacggagccgaagtttgtcttttcagaaagctcagggtttcctctttgtggccctgcagttgacatcaggagctgggcttgtgctcattggtagcaactgtgcctttatggaagtgtgttcattttctctgtctttgtctatatttatttattaaaaagtcttttttttttttgagacaagatcttgctctgtcacccaggttggagtgcagtggcatgatcatagctcactgcagcctcaaactcctgccttagcctccctagtagctgggactacaggtgcatgccaccacaccgggctaatttatttttatttttatttgtagagatgaggtcttgctatgttgtccagtctggaactcctggtcaagcagtcctcccgtttggcctcccaaagtattgggatgacgggcatgagccactgcacccagccacatattttttatttctaatgaattttgtttcccaatttattttcattttttgagacagagtcttctctgtcacccaggctggagtgcagtggagcaatcttggctcactgccgccttgaccttctgggctcagcgggcctcccaccacagtcccccctagttgctgagactacaggcacgcatcaccacacctagctattttttttttactttttgtagagacaggggtctcgctatgttgcccaggctggtctcaaactcctggactgaagtgatcctcctgcattggcctcctaaagcgctgtgattgcaggcatgagctactgtgcccagcctgttttccttcttaatttctctttcagccatcttagggaatgtgccctttttggtaagctgaagaaagtattttttttttttctttttctttttctccccgcaaagaggtgaaatacacatttaactaaaggtcttgagggggcggggtctatctcttctgtaagtgtagcggttccgactctcctggaatggagtccctccctgacagtggggttgtccctccagtggtctgattgtactgataatggaaggaaggtgtttagatcccaggactacttaattttcttcttttgccccaaatgcttcacacataagaggtggaggtggtggaggaggaggaggatagacccaaataaaatttaattggccctttcagacctgcagggaggtgtgtgtgcccagaactgcttttgccgccgcttaagcagctgggctttgaactagagcaagcagagggaacttagcatgttcacccagctttaaaaaataagtcagcgtttcttttttcttatcactgtttcttttggctccttttatttgcaaagtttctgaaacagaatttaaggctactttgcttggcatggtcatttctgtgttttatttaactttgataaatggtgcttgtctgagtgtagccccatgagattaaatttaaaggctattttggctattttaatagaggaaaaaaatttttttcataaatcattttagctaaatactgttagctttcctttctggcgtctcaggagcaaagagtagaatttaagagctggcttgaaatgtttgtgtgcacccctttcagctgtagttaagacccttgtgatcaaagtcagttctctagctctgatatgcttgcagtaattctttaacagctgtttgctattttatccctgaaaaaaaaaaccagtataacctaattaaaagaataaactaattgagaatgtctgaatctgactttaaaatgggccatgatctgagaaaatggaggaagtttgaaaagctgctttttttctcttttaagtggaaacaatattctcaatgataagaaacggaggggttaaaggggaagtgcaggccctgggtctgggccgcctcgcttcctacctatgtggcgctgcatgagtggctgcccattctcatctctacacatggagaataccgaccacttgaggcccaggtgaggctctaatgagatcttctgcaaaaacaccttgcagagaacacagatttggttctcatgaaagtaggttgtcttccttcctttcaccctgaactttagtttccttcttgttctttcacggaattgaggctctgctttcaatgtagagctgttggctggatcaatgggagaaaagaaagcgaatgaaagcacttaagaataaaaaatcatgtgcttctgtcagatggagtcattcctcttagaccacagctgcctgtgtagtctcacatcaaactggggctttctttggaggggaatcattacctaagccaaagctgtgtcccaaggggccttttggaaggtctataagaaccaagcaccacttggacaattgccgtgaaacctccatttctgccaagctcgtttactgcgtttttgtggacttacgtgcagcttctgtgagcttcagtttaatcaacttgaaaattgagggggttgcactttgcgctcagaaattttacgtgcatttttgctttcctgatttcttgatctcctctattttcttagcttcaaaacttttccattttcctagagtcaggatgttcctgggtgaatcatgtgtccctctaccatggactggatgaatggttttaaggtagacataggatttcaagatcctctagggtaggtcttctcaatatgggctctgtgggttcatttgaaggaagtgctcagtcagctggatgctcttgtgttagaatgtaaatataaaaacattgcacatattaaatggactgattttaaaaaactatctgccatgtttgaatgttcaattatttgctgtcttctatcactttgagcatttgagctggaggtaatgattttaactcataagacagacacagaatgacttagtttgggatttctcttctgtagatagaatgatcatgtaaaagagcagttctcaaagctgttagcactttgtaactttgaaggagagcctcataggtctctgtttcctcatttatacaaacaggaagttggaccagatacccacagtggaattctgtggctctggttttattttatggaatgtggtcttggaaacatgatacgggtttcacaaatgtgtatcaacatggaaggcaaggtgctactggtgataagaaaatgaataaaaacaataactaccctctgaaaaatcccttgctgtgtgccagacattgtgccaagtctgcccgtacattatctcatttgttgctaagtgaacctgtgaggcaggtgagaataacaccgattagtctcacagggcataagtgacttggcgcgggtcagagtgctggagagaaggagctggagtcccagcccaggaccacatacacctaagcctgtgtgtcactcactttgttaatggtctggggccataaagagccgttaggataatacaacatgttggctgtgctagtgcctgtgacaggtgccagtggagggtgctttttttttttgttttttgagacggagtcttgctctgttgctaggctggagtgcagtggaatgatctccgctcactgcaacctccgcctcccgggttcaagtgattctcctgcctcagcctccccagtaggtaggactaggactgcaggcgtgcaccaccatgcccagctaattttttttttttttttttttttaagtagacatggggtttcaccatgttggccaggatggtcttggtctcttgacctcgcaacccggctgccttggcctcctaaagtgctgagattacagacatgagccaccgtgcctggccggaaggtgctcttaagtgggcaggatgggttgaagagggcggagtctgcagaaggaaagcccagtgaccagggttttggcaatatcatctccacatggtagttactgataagggccagggccctgcagaagcaatgtcaggggactgacagatacaggagaaacccaggacgtagacctgacagggcgtggcagctgatgggacagaagcagggagccccccaggagtgggagagcacctgcagtcatcagttttacagcctggatggctcagtgctgtcaccaagggctgagaagtcaactctgtgacaaatgttttacttgaaataatgtcttccttcagttgacatgaaaggaacattggtagtgttgccaaaagaaggcatttctttttgtttgtttgtttgtttgagacagagtcttgctctgtcaccaggctggagtgcagtggcacgatattggctcactgcaacctccgcctccggggttcaagtgattctcttgcctcagtcccccgacagctgggactacgggcacccgccaccatgcccggctaatttttgtattttttaggagagatggagtttcaccatattgtccaggctggtctcgaactcctgatctcaggtgatccacccgcctcggcctcccaaagtcctggaattacaggtgtgagccacagcgcctggccatagaagacattgctttgttttttatcacaaagaatctgtggctctggaaattaacttccaggattcttagtgattatgtaaatggtacaaactggaagtaacaaatggaagttgattgcttggtttcaatttatgttaggaaagttatttttacttcttgcattccaatttcctcatctccccagaagctactctgttaagcttgccacacctgggtgcccaccaagctggaaaagcatttagatccagtgttttcaaaggactctgttcaaaagcattagaaaggagcaggtcagttgctttcttcagctcattgtttagttttgatgtaatttgcctgtgacatgaactataaaatgcaattggctattatcccatcttccagtggccatttgtcagtgagtatttctgccagcaaacagaactcaggtgctccatttcctttgatctaggcataagactgagtgtgtaaagcattgcagagcaagaccagagggcatttgtggagttgttaggttatcacaacaataccttttttcatgtttgaaagctgaattactttcccagggcagccataacaaagtactacaaacccgtggcttaaaaaataggcagttacggccaggcgtggtggctcatgcctgtaatcccagcactttgggaggccgaggcaggtggatcacgaggtcaggagatcaagaccatcctggctaacatggtgaaaccccgtctctactaaaaatacaaaaaattagctgggcgtggtggcgagtgcctgtagtcccagctactcgggaggctgaggcaggagaatggcgtgaaccccagaggcggagcttgcagtgagccaagatcgtgccactgcactccagcctgggcgacagagtgagactctgtctcaaaaaaaaaaaaaaaaaaagaaaaaaaaaaagaaaacacaaaacaataggtagttactatcttacagtgctggaggggcaggtgaaacagagctgagtccctatcttcttgactacccatcccttgccagggactcccatttgctgaccccaaccagaagccccagagtaagagagctgaggtgagcagtttgtggagctgggcctgcaggcaggcagtgagagaagagccagggcaccctctgtggttggaggcgaccatgacttctgcctcacagagaacatgaaggctgtgaggcgtgggctgcttccacccctgcctcgctaacctcaggctctcttcctctgccttggcttccattcctgcattctctggccacgggatcctttttacctcccgactgatccttcatcccttcacctacaggacatggcttcacatggcaggcatcaataagaatacctttcattcacacttcagtcctgggattcacagacatgctctgaatttctagacggtcttagcagtagaattcaaatgatgaagaaagagactgctttgtgtagtagtcacagcataagttgaatataagagctgaaaaaacctcagatgttactattaaccatcttatctcttagcctgatcatttttgtaaggacgaagatgacatattttattagagctgttaaacgggacgtctggtttcgtgatccagtgccgagaacaactcttttccttttattgacttgatttcagttgcatttcacagctcattgcacccaagtagatttctccacgatgatcagacctcctgtgtgtcgcccacaggactgagctgcttggactcgcaccattcctctgatcatgccctggggtttattacgatctcacccattattcccatcacacgaggagaactctcgctccaagtacaacagtacgagtgtttgctaactgtggactctgcactccctcatgaaaccaagagtgtttcttcttcgtttcccttcctttccattttaaggaccatttctctaaggcagactttcccgtcaggaccctcccctgccttgtgtctcttttgaagctcctgaaaggcccgtggccatcttagaaaaataaagttctgattttctccagaaaactggttcagcagaaaccaagacactgccaacagccctccggcgtcctgccaaccgggctgttagagtctttatgtgggtaggtacaagttgccttgcttagcttccaaacttatttttgccctcttgtctggctcctaaaatgctggatccaggggcctggagagttggttttgtctctggttattgtttagtggcacacaaggtactgactgaaaacaagggcgtttttgtacatcccttttacccacatgcactcttggggaggtcagtgatggttggaagtccctgctggcaccgtctctgccatagcattgggggagcactttagttgtccgtttttccaggctaatccattccttaatgacttaagttgacatttgttgaattatggagtacgagttcgctagcactgctataacaaagtaccacaaactgggtggcttgaagaatctcagtgtatggtctcagctctggagaccagctgtctgagatcaaggtgtcttcagggttggttccttccaagggttgtgaggaaaagctggtcctgtgcttctctcctggctcctggaggtttgctggtaatctgtggcattccttggtttatagatacattgcctctgtctctgcggtcatcttcacgtgattttcttgctgcgcaagtgtttctgtattttcccctttcgtaaggacatggtcatattagattagggcccgccctactgacttcattgcaacttgatcattttcaaagacctgatttccaaataagttcatactcacaggtaccagggattaggacttcatctttttttttttttgtggaggaggggagatgtagtttaacacaactgtataacaactcccattgttttattttaacaaaccgtttgaaaaatggctgtgctgttgactgctgctgtgacttctagctgtgtaactcatttccccagttttctgctcttgttcttttggagcataatgtagtctgggacattttcccagtaagtggaggagaccagaactcttaaatcacatgtatgtgtacttggaattagaactgaagtacgggtggccatatgagatgagaaatcccagctgtattaatcaagtgaactgtaagagcgattggttttttttgttgttgtttttgagttatttttcttcaccatcactctcccaccaccatttcccggtggatcagtagtgggagagtgcgagtttgaaagctaccaggagcacctctcaaccaatcatgttgcatttctttctttctttctttttttttttgagatggagtcttgctctgttgtccagattggagtgcagtggcacgatctcggctcactgcaagctacgcctcccgggttcacgtcattctctagcctcagcctcctgagtagctgggactacaggcgcccgccaccatgcccggctaagttcttttgtatttttagtagagacggggtttcactgtgttagtcaggatggtctcgatctcctgacctcatgatccgcccgccttggcctcccaaagtgctgggatagcaggcgtgagccaccgcgccctggcctcctgttgcatttctaacgttcatgttcattccggcaaatgtctgttctttagatggattagtccacgttgaaaaaatgtcttcaccattatcctagcattcactcaggcttccagaagctatgttggggaacatcactaatcatttaagaaatgcaaatcaaaatcacagtgagataccagctcacacttactaggatggctactattaaaaaaaaaaaaaacagaaaaaaacgagtactgatgaggatatggagaaattggtactctgtgcactgttggtgagaatgtaagatggtgcagctgctgtagaaaatattatggcagttctaaagaaatgtaaaatagagttgctgtatgatccagcaatcctcctttgggggcatgcccagattgaaagcaggatctcgtcgagataattgaacacccatgttcatagcagtactgttcacgctagccaggaggtagaaggatcccaaacatccatccttggataaatggagaagcaaagtgtgttatatacgtgcaaaatggtgtactattcagtcttaaaaaggaaggaaatcctgccatatgccacaacatagatgaaccttgagaacattatgctaagtgaaataagccagttacaaaaagaaaaatactatatgattctactaatatggggtacataaatagaaacagtagaatggtggttgctgtgggaaggcagaaatgggagctgtctaatgggtacagagtttgttttgccagatgaaaacattgggagatctttttcacaacaatgcgaatatacctagcactactgaatgtgcacttaaaaatggctaaaatgggccgggcgtggtggctcatgcctgtaatcccagcactttgggaggccagggcgggtggatcacctgaagtcaggagtttgagactagtctgaccaacatggtgaaaccctgtctctactaaaaatacaaagaattagctgggcatggtggcgggcgcctgtaatcccagctactggggaggctgagtcaggagaattgcttgaacccaggaggcggaggctgccgtgagccaagatcgtgccattgcacttcagcctgggcaacaagagtgaaaatcagtctcaaaaaataaaaagaaaaaggaaaaatggctaaaatggtaaaccccatgttacctgtttttttaaatcacaattaaaaaaaaaaatgccacagagcagcaatgtgatttggaaactagttaaattagccccagctgattgaagtttaaaattcaagtttccctaccattcatcgcatcatttggcggttatctattgtttgtatagtatatcgttagttaccattttatggatctcgccttacagatccatcagaccctttaaggctgtgactggcttctctgggatttccccggttgccagagtgtttcttgcacataccaggagtaaaaagttaatggaactttttttttctgttcattgatccacttacgggatcttctgcagattacctaattctaaggattggttcacctcttcttgcatgatttgcttggtttctaggctatccgatgattgaaaacacattgcaaagatatagaatgttaaaatgatactgaagttactaaagggattagatgttctttattttctagtagttgctatatgcactgaccagttgagtaataagattctcataacctcagaaataggaatttgttattctttttaacaaatacaagattacagaatcttttaatatttgtataaaacttatctttgagcaagcaagccaagtagcatctccctgctgctctagacatgcagatcctgcaattaaatattgttttttgaataacatatgacattccaagcagagagctgccaagacatagcatgtggaccttgctctagttaattcctcgctagtgacacattttctatttacccttctacccacatttccccacatttctttgcaaagattcagctagcagtgaagatgaagatagaacacatcaagaatggtgtttgtgctgttgtgttgtagcatttggaaacttgcagtgtgggatttttttgcaagaaatttaaaagttatgttttaataaaagggtagcatttgggtaaatttccccattatgaaaccttttctatttatattttatttacaacatgaggcctctgagtaacaatgtaaaatattattaacttttataacagggacaggacatatatacattaataacataatctcagatttcttttttttttttggagacagggtctctctgttgcccaggctagagcaagtgcagtggtgccgtcatggctcactgcagcctcaaccacctgggctcaagcggtcctcccaccccagcctcctgtttagctgggaccactctccaccagcgaatttttagatgattattatatactttatttcttttttttttttttttaataaagatggcatcttgctttgtttcccaagcttcagttcttttttttgtttttagtggataagggttacacagcatagcatataataaaaactacaaaggtcatgtcagcaaccctggtggaaagccatggggcttgcagtatctcacttgagttactacgcctctctctactgtattggctgttatgggttaagaatatgaaataaaaataaaaggtagacaatacacagatttattgtatgagtgttgaagaaatactcagaaagcaagtgttgtttaaaatcaagttgtgatggtataaacgacatttcctagcaggcagcctgatggtcactggtcgtgcctagtaccgtaggataaatgagacattgcctcttacttgctttagagaagtgggcactcccctcccctcacccaagagagacttatttgggcattattgaaaaaaatttgtcattgtctgtgagcctgttataggtaattttaataattacatgttaacattacaactttgagtataagaggttttggcatctttgaacacattataggctttagtgagaaccagagaaacatatttggtctttcacagaaattaaccctaaccctccgagttccttagtattcaccccagtgcaatctatgtttattgtagcaaattgagaaaatgcataaatggttaaagaaataaaagcttccatcagtcaaccaaacaaaagcattgatgatttagattatgtctttgcagttgttttcttttatctatgttctcaattaagaacctttgcattgtaagcaacagtaagtgactctggttaatgtcagcagagaagtgggcttgttgtgaggtccctgggcagctcaccatggtcaaagagtgtggacatgaattactgtgacctaggcagtcaccccatttgtcttttttctgcttttttttaataaaaccagaatatattatacatggtgcgtgttcctcactttctgtgccttgggaaacactgctgtgatgggcataacgagtctcaaagaggaaggatctacgggtaaaggagatgcatgcagaaacagcctctaatttgtcagtaagccatgcagttagcaggtgtattagtctgttctcatgctgataataaagatataccagagactgggtaatttataaaggaaagaggtttaatggactcacaggttgggaaggcctcacactcatggcagaaggtgaaggaggagcaaaggcacatcttacatggcggcagacaagagaaagtgtacgggggagttgccctttataaaaccatcagatctcgtgagacttattcactaccacgagaacagtaaggggggaactgccccccccataattcagttatctccacctagccctgtccttgatacatggggattattacagttcaaggtgagatttgggtggggacacagccaaatcatatcagcagggaatggtttagcagttcacaatgacaagcctgggtgcaaggataaccccaagatactgcttcggccaagctgatatttggacggaggacacagaaaataaattcttaagctctggagctagggagaacagaggatgtaaaaaaaaaatactctggacaagcttagtggcagtcaaggaaagcagaagcagtcaagcagttttacagggcagtgcacgctttccatgtagatgctatgttgtcattcatttctattttctatttcttattttattttattttattttatttgagacagaggctcgctctactgcccaagctggagtgcagtggcataatcttggctcactgcaacctccgccttctgggaccaagtgattctcctgcctcagcttcccaagtagctggcattactggtgcctgccgccatgcccggctaattttttgtatttttagtagagacagggttccaccatgttggccaggctggtctcaaactcctgacttaaggtgatctgtctgccttggcctccgaaagtgttggtgagccaccacacccggcctcatttctgttttggagttcagatttacaaagggactagagtactttttttcctcatagagaataaaatatcctctttaaaatttgcccttttgctttatttttatttaatttttttgagatggagttttgctcttgtggcccaggcttgagtgcaatggcacaatcttggcttactgcaacctctgcctcccaggttcaagtgattttcctgcctcagcctcccaagtagctgggattacaggtactcgtcaccacgcccagctaatttctttgtatttttagtaaagatggggtttcgccatgttagccaggctggtcttgaacttctgacctcaggcgatctgcccactttggcctcccaaagtgctgggattacaggcatgagccaccgtgcccggctttttttgtttggttggtttttttttttttttttttttgcttaactaatgaatctttaggggcctgttgtttttaattcacttagtctcactttaccaccatgtaaactacagtttggtatacagtcacttcagattttatttacttttgttttgaaggagaactgctggtatttataggaaaagatttctgtcagaagtagttttcagattttcatgctaggagtgtagatttcataaatgggcaccaatgtgcctagttaataatgtatgcaaagatcatctccttacagattccaggcatgcctcatcttattgctctttgctttatttgcctttgcagatattgcgttttttacaagttgaaggttggtggcaattctgcatttcgcatgtctattggccccatttttccaacagcatgtgcttatttcatgtctctgtgttagcattttttagcaataaagtatttttaaggtatgcacactgtttttaaagacatgctgttgcacacttactagactacagtatggtgtaaacattttttttatgcactgggaaaccaaaaaatttgtgtgactcattttattgaaatatttgctttattgcggtggtctggaaccaaactcatagtatctccaaggtatgcctagatatctgttctgagaaagctgcggtttgaaacttcatattgagtgaatgatgatttcaatactactgtctgatttttcccagaaatcaatctctaatggtttccctattgacagaagatcaagtgaggaccctgtgaaggcctttcatggtatctgttgtcatttaggaggctcagaagttcaagggcctttgtctgcaggctggtgtgttcttctgggccccaggccctcaggctttgaggctgtaagcgagcacttgcctgggggtaactatccagctcagtgggtaggtttttccaaggcatggatggttgacagcttggcagagcatctcatccagaccatctcactttttccatttgtatagaattctctgttaaaacaaaggtgttgtctaatgttaagagggagtggtgttaataaataacatcttcctctcctgagttcagaactaattaagaaagaggcatgatatccatggctagtcacagtgtccaccctgttactgatgaatgctggaccttgatgcctgtcagccaggctggttaactatgccctgaattagacactcagtcactggtgtgcagactgggaagccacaggctcccccacgtgagaactctccagaatgtgtgctctcggtgagcaggtagaagttacaggagaggggaaagaactcagccaaggagtcccagctccttcccccaaatacactcattagatagacaagccccagggtggggccaggagggttccccagctgaaacttgtccacgggtaccatgaagaggaaattgtgtttaaatgttattacaagtcctccaagcttctatgcatgtgaagaaatttgaattctcagggggaaactgaaaagctctggaaatcacgtactgctcaattcaattcagaaggtgtgagttcctaaggagcattttcacttcctttcaaacttaaaaaattgtggtccaaggaatgacatgggattctgactttttatgacccatgctaactgatttggtgacttctgccagtgcaggaggctcggattttcccctgaaagagcgccctgctcatctcagaaaggttcaggctgtcgggtccattccgcaaggactcgcttcatgtatttcctttacaagtcagaaatggaaaaagaggaaattaccatcccacatcttttcttgatgtgtatgaatgcgtctgcctccaactctgagggtttcttctccaatcaggaaaaagttgacatttgccaccaagtcagtacgcttctaagctttcattttatttcatcaggactgactgagcgtcagcattctggccgagtcctgcagttttacccactgtgcaggtcagcgttttcttcaaggactctggccctggcttgctggcatcctcagagtgtctggatgttacccaggggcttcctctcacctcaccttcattcttgttccttgttcttagatggatgggaggttcagttgttggaaactaccagttagactaagaaagctggacttctttcatactccttaaggcaagtagggtataagtaagtggcctgttggctgatctcaaacatgagagagcattaggttcattaataatattctgactttttcttatctaagccagtttactgattaagaaatcatctggtgaaattaatctcaaatatttttaaatgctcaaagaacatattgcttcagcttcattaaatacttgtctaaacacctggaaaaaatttccacctccgtttcacaatactttgtgtagtgaaacctgatggagtgatagtgtgttagttattatggaaatattgtggacaattcacaagcagagtgtttgttccataaaattaaacctgaaatatgtttgcttgctcttaagttagaagtattgacaagcaggaaacaaaaagagaaataaatgaatgtatggacaagcagctgaagaggaagctcagagattctgtagtatttctttggctgtctatctaaatatgacacaacagcctccattctgagaaagcaaattgagctgacaggtgccgccaagcccatctttccacataggaccgaaagactctgaaacactcccaacttctccatttttaatattctcttagaaacactggatttgtaataatgccttttaagccaggggttagtaacatcttttaattccagtgatatcaatcaaaataaattttctttagaggataaacagagctaactagatttcttcccatatccctcattgagtaataaaaagtaggtagtttgggtctctcctgaccttgatggcagtgacagtgctggcgagatttttatgtctgagtccttgtgtgtaccccaccttctggcttctttgatggctgtggtggagctgcttggcatttttacacccctgaacaccttcatcagttttacagagaacttagtgtggtcctccccaggcaatacccccagagccacataagtttcatcacagtgcccaaggctgtgggccccagggaatcgagggtaatattctaacacaaatcaaaagtctcaaaaaagccacaagtgacttgaaggcactgagaagaaattctaaagtgatttatgtctgatatcatgcctagaattccattatgcctgatgtttcaaatataaagaaatctcctggggaggtgataaaaggagctacacaggtatcggagacagagggggaaactccctctctccacagcggagtgatgcccgggtgtgggatactctaggtaggaatggaacatttgaccgatagcttagagtgggtgggatgtcataaagctcaccatcttaatcatttttaagtacacgtttcactagtgttaataagtatattcacgttgctatgcatcagagctccagagctctttcctttttaaaactgaaactctagatacattaaacagcccccatttccccgtcccccagcccctgccaaccatctaggctcattttatacactggtttattccgtatcattcataaaccgtacaattcacctctgtctttttttttttttttccctgagacagagtttcgctcttgttgcccaggctggaatgtaatggtgtgatctcggctcacggcaacctccgcctcctgggttaaagcaattcccctgcctcagcctccagagtagctgggattacaggcatgtcccactacacacaactaatttttgtatttttagtagaaaaggggtttctccatgtttgtcaggctggtctcgaactcccgacctcaggtgatctgcccgcctcggccttccgaaactcatataattggaatcatcctatatgtggccttttgtgactggcttcttttctaggcccgtttttagaacaaagagggatgaacctttgctttaccataaataaccctcatcacatggcattttttcttcttcaaaaaccttgatttgtagccgggaaaaagtgattttgtgaagatatggagctctccatctaagcagcacctgtatgaaaacttacgaaaaagaactatgcttccaaacacgatttaattaaaaccatgtaaggccataaatctagtaatatgatacctgctcagagccttccttagcttgcacggaaaatgcatagacgttgccaacatctcctacgtgcatttctaaaataatacagttggccattgaacaacacaggtttgaacttctcaagtccaatgttatgcagagttttaaaaataaatatattggaaaattttttggaggtatgtgacaatttgaaaaaaacagatgaacctcatagccaagaaataaaaaaattaagaaagtgagatatgtcatgaatatataaaatatatgttggtagtctattttatcatttactaccataaaatgaacacagatctattacagaaagttaaaatttgccaggcgtggtggctcacgcctgtaatgttagtactttgggaagccaaggcaggtgggtcacgaggtcaggagtttgagaccagcctggccaacttggtgaaaccccatctctactaaaaatacaaaaataaattcgccaggcgtggtggcacacgcctgtaatcccagctactccggaggctgaggcagaagaatcacttaaacccaggaggtggaggctgccatgagccaagactgcgccattgcactccagcctgggcaacagagcaagactctgtctcagggggaaaaaaagaaaacgttaaaatttaggccgggcgcgtgtggctcatgtctgtaatcccagcattttgggaggctgaggcaggtggatcacttgaagtcaggagttcaagaccagcctgaccaacatggcgaaaacccatctctactaaaaatacaaaatttgccgggcatggtggtgggtgcctataatcccaggtactcgggaggctgaggcaggagaatcgcttgaacctgggatgcggaggttggagtgagctgagatcacgccattgtactccagcctgggcaacaagatcgaaactccgtctcaaaaaaaaaaaaaagttaaaatttatcaaaacttacacaaacgctgacggactgtatgtggcaccgattgcagttgagagaaatgtaaacaaatgtaaagatgcagcattaaatcatgactgcatgaaattaactgtagtaacactatactactgtcccagtctcatagccacttcctgttgctgttgcagtgaactcaagtgtttttagtatctgcttcaaatgtggatcatctccgtcatgagcggttcatctccactaaattgcttatctcagtaaaaagtgatcactcgtggttcttgcgtattttttcatcacatttagtgcaatactgtaaactttgaatgacactatgggacccgtatgaagtggcaccattgattctggaagtgctctcaggaagcagagaaaagtcatgtcattacaagaaaaagttgaattgcttgatatgtagcatagattgaggactgcagcttcagttgcccaccatttcaagataaatgaatctagcataaggaccattttttttttaaagaaagaaagaaaaattagtcaagtggtcgctatggctacatcagcaggtctgaaaaccttgtgctttttgcgaaatgctgttttatcttgtattgaaaatgcagcttttatgtgagtgcaggcttgctctaagaaagtcatacctatagactctaataatatgatttggggaaagtgaaaacttaaggcaaaaggaaggtgaaggatctaaagctggagaatgtcatgccagcaaaagcatggtttgataattttagaaaaaggtttgacttaaaaaatgttaagatgacaggagaagcagcttctcccgactaagaggcagtagatgagttcccagatgccatcaggaaaatcatagaggagaaagcatatctgcgaaacaggttttcatgcagatgtctctgctgcccttgagacagcaagaccaacccctcctcttcctcctcagcccacttgaggtgacgctgttgaggatgaacccttatgatgatccacttccacttagtaaacagattttcttaataacattttcttgtctgtagcttttttgtaagaatacagtaataatacacatacaaattatgtgttaatcgactgtattccgttctcatggtgctaataaagacatatctgagactgggtaatttattaaaaaaagagggttattggactcgcagttccacatgggtggggaggcctcacaatcatggcagaaggcaaaggaggagaaaggcatgtcttacgtggtggcaggcaaagagagagtgtgcagggaaactcccctttataaaactatctgatctcctgagacttattcactgtcatgagaacagcataggaaagacctgcccccatgattcagttacctcccaccaagtccttcccaggacatgtgggaagtatgggaactacaattcgagatgagatttgggtggggacacagccaaaccatatcattgactggctatgttactgataaggtcaacaataggctatgagtagttaatttttgggggagtcaaaagttctactcagatttttgactgtggagggggtctgtgcgccaacccccacattgttcaagggccagctgtacttgaggtagcaaaataactaacccacttagcatgcgttacctttgttgttttagagaaaaacccaacttcctgcctgggaaagtctgattagtggtatggatggggtcttacctgttaaaactcacagggaattggacttccttatgggttaatgtatctacagactactttcagcatatttttgaagatttactgcagttgtggggaaataacaccagcattcagtatattgaacacttaagatacttaccctatggagaaaggagccccaagggaacaagtgccggtttacgcagctgtctcctattaggttctctaccctggaccgaccctggttgtgttttctctccctcatcccatcataaaaactggagcccacatccaggttcagccaaggccctcagggcaaacactggctccactgcccctttattgcgtgcttgcaattggagctctttgggcctgagtttccttactgttttgcttgatcagcagtgcgttgacaaagatgttgtttatattttatccagcatttttagctgtttcatacgatttctacactgtggaatcattttaagtggtgtgaggggtggagggggaggagacatggctggagctgaagaactgatctccagcatgagtggggctgaggtccggattaggcagtgctgttagagactccagcaggcctcaggcagggatggcaggcaccaagtggcctgggggcagtggggagaggtggtcccttgggtttctggctgggccactgagtggcgggtggcattggttattgaagggctgctcccggaggagatgagcggggagggggtgctcaggtgagacttctggggagcaggtgactctctggctccaagcggggagccccacctggacttgctggtggggctgctggtccagactgtgctagaggagagagaaagggctgctattgtttgcctcccagcaggtgaaggaggaggggcccaaagacacctgggcaggtaacttcatcaggaagacggctacctctcttctccagagagcgagagtgaagtgagcaggtgatatccgtggtgatccctccacaaggagggaaggaggcaggaggggaggtggctttagctccctttcctttagccctgtggactggaggggccttgatcatctcttctacccttgcacggggtcacccttggccagggacgcctgtggccagtggctggggccttgtgctgcttaaagcatgagttattagcacaaccgattcagggtagacgcacgttttttgggacttttggaaaaggaacacgcgatgacgaatgaatgattagatctgaggccttggaggggtcagcgagtgctggccttgaaactcaagctgctttggccttggtgggagtcttgcctgcgtggtgatggtgacggttggagtggccttcccaggcaggaagggaggatgcggcgatgctcccagtttattgaaacctgactttgttccctgctggcagctgttctgagagaagaagggaggtgcagggcactgggggcaggcaaacagagaaggatggttgcattctatgacaagttgacagcattatgagaaactgtaccagatactttgttggtggatggtctggggctttgggtagaaaaagaaaacattagagctgagatgaaaaggaaaagaaatcatctgaccagcaagactggagtctagagaggtggtccgcctgcggacgtcatctcactggtcgggagaggatgagaatttcagtgatttcaacacgagatcaccatactgacaaataacacctgagagagtgggttggttttgtgtcgtgttctagtgcgttttcatcgtgaacatcttaggatgggaaggcctcagggaagggctttcggggaaggacagaaccaagaggctttagtagaacccggaaacctggcattcctttacgatccggcattgagctttgccctggacttcctaggagttacaagatctgaagctgctgtttgagatgcacagcaggactctggtgggtgactcaggagaaggaaggcagaaggcagaatccccgccctagcgaagattcgaatccagcacgcgcacatggcagtcgaagaagagagtgtagacagtgggcaaacttaagggactgtcgtatggggtgaacgaaattcttaagtgccaaggaatgcaaaaactggccctgggaagagtcaggaatgaggtggtttctgccagaggtgaggtctaagtggagttttcaagaaggctgtgggtgtggcgggcagagttctagggtccttggggtgctgctggcaggacgagcctgagagcttctggggaggtggacggcatgtgctgggggcccagaagcttttgagaagcacctccaggggagtgtggggcattttgatgggcaaggcccttaaatacggcatgttgcacacgatggggtggactccacaacaggcacatggaagagaccacctctctgcagggtcgtgtcctgcacatctggactagaatgcaagcttctctttttagaaaaatggggccaggcatggtggctcatgcctgtaatcccagcactttgggaggcccaggcagcaggatctcttgaggccaggagctcaagaccagcctgggcaatatagtgagatgtcgtctctacaaaaaactttaaaaactggccaggtgtggtggctcacgcctgtaatcctagcattttgggaggctgaggtgggtggatcacctgaggtcatcaggggttcgagaccagcctggtcaacatggtgaaaccccatctctactaaaaatacaaaaattagctgagcgtggtggtgcatgcctgtgatctcagctacttgggaggctgaggcaggagaatcgcttgaacccaggaggtggaggttgcagtgagccgagattgcgccactgcacaacagcctgggcgacagattgagactctgtctaaacaacagcaacaacaacaacaacaaaacttaaaaaattaaccaggcacggtggtatgtgcctgtagtcccagctactcaggaggctaagccgggaggatcgcttgagcctgggaggtccatggacaggtcctctgctgtacagcttgtttttctattttatgtgacagatgtagcaatgtgtcttgcattgacaggctctgcttgcagtcattttatattaaacacaacctatgtttagatggaccaccctgaaagtgttgtttgagatctattaaagaaacatatttctatgaatgttcgtagcgtactccccctccctcgaggccgtagggaccgttagtgtttactaccttatggaaactgtttttctccatgcttttatctggaatagcactcaacattcattagctaaataggaaacttatttcagaggggatcatttttcatcctaaagaggatttttaaaaatttggggccagatgcagtggcttatgcctgtaatcccagcactttgtgaggccgaggtgagaagatctcttatggccaggagttcgagaccagcctgggcaacatagtgagacctccatctctacaaagaaaatttaaaaggtagccacgtgtggtgctgtgtgcctatagtcccagctgcttaggaggctgagatgggaggattgcttgagccaaggaggttgatgctgcagagctgagattgtaccactgcattccggcctgggcaacagagcaagaccctgtctcaaagaaatctggacttaatataaaattttgaaagatgtaaggctatggaaaaacatagtaaaaaattattcaagaatattttgtaatgcatgaaagcttttgaaaggctaattttatctttagttgtataaatatattttggaagagaataagattttaatatgtgtatctacattatctgtgtctttcactaataagacaaggttcaacatctgtcttcagattgcattttctgtgggaagaacttaggttgtaggcatttagctcagagaaaggggaaaaggtactttcactgctcactttttgctatttctgccccaagacctactgttcattctccagacttgctgtattttatgtcgaaaggttttactgtttccatgaggaactgtggttcattttccccaggcttataatcagtaagtagtgattttcttttcagtgttacttactgtgatactgtaaaatcaaactaacaataaggtgccacaacgccataaaaaattaataatattgggaagatgttgattcccaaactaagatttgggctttggttttgaactgttaatttgttcattcattttaatatttcctttgactgtctcagatataccaaagcgtggtgcattgtggaatgtgtgccagtctcaatgcatgtagctctgtaggatggaaagtcagttatgaagagagacttctttttcttctgtgtcctgttgattaagaagaatctgtatggccgggcacggtggctcacgcctgtaatcccagcactttggaaggctgaggggggtggatcacgaggtcaggagttcaagatgaacttggccaagatagtgaaaccctgtctctactaaaaataaaaaaaaaaattagccgggcgtggtggtgggcgcctgtaatctcagctacttgggaggctgagacagagaattgcttgaacccaggaggcggaggttgcagtgagcctagatcgtgccactgcgctccagcctgggcgacagagagagactccatctcaaaaaaaaaaaaaaaaaaaaaatctgtataacttgcattgccctttcaggtaattaatcaccctttttttccagcagggttaaagattgtagtattgactatcagttattttgtaacaaaaactggacctaaagttcaattcactgttgactttttcaagaggagtattaaatttttactccctgctgtacatgtggaatttcagtgtaattttaagccaaattctttaaaatatgtgaaactcatagtgctattacaaaataattacaaaggaagcaagttttctcccctgagcatcttatttctagatttttttttttcctaagcaatctcttgaaaaggaatatcagtgagcagatttctctggggccatttgaacttcattaaaatttcagagagggcttttcaatgagaatatattcatgtaagcactggagagttttgcataattttaaagttgaacagaattgggtacaattagtgatgaaaatacagtccatcccagattcctagctgattgccattttggttttcccagcaaacaccctttctaccccacttcctagctttattgagatatatctggtatataaaaaattgtacataactaatgtatacaatttggtgagtttggatataagtataggctggtgttaccatcacccagtcaaggtaataaacatatccatcacttccaaaactttgctgtgtctctttattgttactgttttttaaaaaacaacaacaaaaagcgccttttcaagggagtagcatttgctctcctctcttcccagatggtgtcctcatcctccttcctcaaagccaccggctcctcctggacgggttgggtactgagatgctccatgaagcccaagcaccattcacatctaattgagaagtttggagaggacagaattctcactcatcttacaggctctatttcttacacaaactgggctggaagtagaagcttagcggtcacagtcactgaagagcttcttaatcttttttgagtcaggacttgaagtcctgtttcattatttcattcaaagaaattgattggcaatggccagagttaaattcaaaggtgacattaacacatttcagtgcccaataagtgatttttctgctgggtaggagtagatacagatgtgatctcagatacgtgaagctgcatacagaggggcccatccactcctaaacgggtctccaggaggcttggtttgatctactagatttggtgcctcttaaagggaagcaatacagcttttctgctgtgggttgtttgccactaggggaagattcatttctattccagccataaattagaccaaagagagggatttggtttattgctagtgcagaagttaaaaaccatcttcctttcctgagtggtctcttaattagattctttagtttttaaatgttaactggaattgctgaagtttaattcctgaaagggtttagtttttaaaaggagtacctcatttaccatattactgtgttctgagaaatctacagtaatttttgtgtaacttttttattcaaagaatggattgttaattgtaaagccatttagaaaggcgaataaagtcagatctactttaatacatgtttgtcttaccagcttattgataagcactttgtgggatgtttatgtgagaacagttgattttaatgagaaaacagattttcagctcccatgttcagtgttttatgtgacaaaatcatacactgcagcaactaagtaatacgaagtgagtactttaattgaaacaattagagtgacacaggaggcattttctacttgtgtaaacgcaaagcttaatttttaaaaagcctcccccagttttccttcctaaaggaagtggatgatcaagcctgagctagatagaatagcagatgtgtatttcattattaatacaagaggaatctttttgggttaatagaactattctttagaagaagaacttgttttgtgttacaaaggtgttacatggttacttacagtaacaatttcgagcagcacagaaaatgcagaaatgtatcccattcttaggatttttgagataaattcttttttttatttggagagggagtctcactctgtcacccaggctggagtgcagtggtgcgatctcggctcacagcaacctccgcctcccgggttcaagcaattctcctgcctcagcctcccgggtagctgggactacagatgcacgccgccacgccaccatgcccagccaactttttatattttagtagagacgaggtttcaccgtgttgcccaggctggtctcgaattcatgagctcaggcaatctgcccccctcagcctcccaaagtgttgggattacaggtgtgagccactgcgcccggccgagataaattctttttttttttttttttttttttttttgagacggagtctcgctgtcacccaggctggagtgcagtggcgcaatctcggctcactgcaggctccgccccctggggttcacgccattctcctgcctcagcctcccgagtagctaggactacaggcgcccgccacctcgcccggctaattttttgtatttttagtagagacggggtttcaccgtgttagccaggatggtctcgatctcctgacctcgtgatccccgcctcggcctcccaaagtgctgggattacaggcgtgagccaccgcgcccagccccgagataaattcttaattctcatctgtagatcagcaaaaataagcttagtcttctgattcttgtaacttaaaaaaaaattagagtctatagtttttgtctaggaaacatggttgtcagttttcattgttagagtctcaaaataagtggtgtgtgtgtgcttgcttgtgtgcctgtgtgtttgtgagtgttgtgtgtgtgtgtttacatactatactccctccttctcctctggggataatctaaaaagctcaaagttcttagtcctgggtactgaaacaatgctataagggaggcatttagaaaagcttaattttaaccaggtacttacaccacaaacagaatgacatcactaagcacacagcacgttagtgaacagtggctttgtcagagctttctacccagagccctgaaatggaacattgttaattagctttaaaaaatccagctgttccttgagcccatggattctgcctgtgcacttcctgcatacaaccgtctacacagaaccgagggctggaactcctgtgtttaagaaggcagctgttccttggcggggcacagttgctcacgcctgtaatcccagcactttgggaggccaaggtggacggatcacctgaggtcaggggttcaagacccagcctggccaacatggtgaaaccacgtctctactaaaaatacaaaagttaactgggcgtgatggcgcatgcctgtaacccgcatgcctgtaatcccagctattcgggaggctgaggcagaagaatcactggaacccaggaggcggaggttgcagtgagctgagatcgcaccactgcactccagactgggtggcggtgagactctgtctccaaaaaaaaagtagctgttcctttctacacctagaagacgatgcgtgccatctaccaatagtgtcacgcccagggtgtgtactctgttggtggtgtgcagccttccacacccctggctgggcccactttggcccccacatagagttctttaactgccctttaagaaagtcacactaagctctaaatgaccaggccgggtcactaacgcagacagacaccccagtatgactggctgggctatccatccccgcagccctgctgggggagtggagctcactgggaggacaggtggtgtgaaacagagagagctatttgaactaacatgggaggagggaagacggagaaggatacaacagacagtgagctcagggctctgctgggatccagggcaggggaggaacctttcccagagaaagttaggaaggtgagcaaaggttggtaggttgaccccagcttccaccttcaacggattccaggcagttcacgaggagccagagtgtagatgatgcggattgggagccgataagaaagtccaggcaaacagaaacagagaacaggggcaagatgtccgcagcatccagaaggaggcctcttcacaaagtgaatgccaccaagccacggatgtggtcatcagcttccagcgatccttgtgaagagctgtgtattgaatgctggacacttgatcagcagtcgtatgataagaataaaccagttctcagaagagtcgcagattcctgacactaagaccagaaacacatctctgccaagggtccaagaaggaaacaaattttatgaacaaaaaccttcgcagcctctctcagcatcagagaggcgggtacctcggacctgtcttcccaaacaggccaatgggtgcaatcccgtccagcccagcaaacagcaactctaatgagagaaatgggccaatgacacctctgtctaatatctggcatgagtaaaggatagattttgcagtacctagaaaaatagtgaaccagttctctctgaaatattctgtgatttttgaactcttttctactgtatttgggtggaatgagatttaatagtggactcagggacactgagggtagagggaggggtaaggagatacctcctagcagtgatgtgagctgtttctccccgggtagagggcttccccaaggtattttcctgtggccatagacataatacagtatccttttataggatgggatagtgtcaggaaacaaaatgtctcatgttttaagaaatcatgagaagcttcagaaatacttttggatattaatgttaaatctaggatatgctgagtccttaccacactggataacacattcttcatggattccgtatttgtgaatccacctactccctaaaatttgtagtccccaaatcaagcttgtggtgctttcctggtcatttgtggacctgcccaggattacagaaaaatgtgagttgcccaatgtgcacattctcagctgaactcaaatgagggtctgccttcttgtctcagctctcgcgctggaaacaggtgcctttttgatgatctagttagtgccgtgatttgtttgcgttttcgtgctttttgttggtgatttcactgtttaaaatggctctgaagtgtagtgctagaagcactgtccagggttcctgagcgcaagaaggctgagaatgtgccttacagagaaaacgggtgttagggaagcttcatttaggcataagttctagtgctacttactggccattaattcaacattaatgagtcaacagtgtatattaagtaaagtgtcttttaacagaaacacacattaaacaaatttatattgttcagttgatgagaatatgacagaagatctcagaatctaatcttgtatttctcctagacgcaacagttcagtgttccctagttcagtggtgaccatgtagagtgcaactacagcaaataatgagaatcgactgtatttcaactaagtgagcacccatgggtgctcatttagacgaataggaattttcaggtatcttttgtgatgctttaattgaattattttactgttacaactttgcctttggaaatattgcaagtatagctccttgttaatgtacttggtgaacttttttgggaacataaaatttttaatgatacgatacttcttttatgtgacatggtaagaacttaaactcttgtaagatagacgcttttttgcaagagtgttacagcccattattgagggaagaggtctgatttttgcttgaggaatacatcattaaaaagaacttctggtctgcttactgttttactttttccttgtggcaacagagatattttggcagaagtcttgtgtttccccaccatgttcttcacccagctaatggcccattgatgacacagaaattgtttggctattggaatgattaatgtcactcaggcctatgtctcggggaggcaggaaggtaacaagatgtacatctcccaaagaaatatcacacaggccttgtgtttacacctgtctttgagcattatagaagaaaaaagacagacggaaacctgaggccataccgtttcttagtgatggttccccgtggtggtattgacaacatgaaattccaggggcaaatgaacagtctggttccccacctctctcccttcagttacatatgcgatgtttgacagctccttccccaaatttcttttggaaatcttcaaaattcatcagggtttagattgttgacctgttttgaaaacctaatttttaagttttcaatcttttaagccttggaaaggataggcatttaataaaagagaaaatagatgattttatatgtatgagaaaatacatcgctttaaatttactcgtgagattcaccaatgatttctgaacaccaaacattggggtggcccagtgacttaatcggagaaacacagacactttgaaaagaaatgtgggatttaaaaacctgcaaaactgagtctgtcattctttaaaatgccatctcaagtcacaaaataatgatgttaaaatctgaaaccatatgtgttttgaatggtttaggttctaaagaaaggtacaataatgccagtcttttgggtttgtacatgatttgtttctttctcacataatctgtcaaaactttaaattgtgaaatatggcatatttacaaaagaggctataaaaagtgtaagtatagtttaacaaataaaaatatgagggccgggcacggtggctcacacttataatcccagcactttgggaggccgaggcgggtggatcacgaggtcaagagtttgagaccagcgtggctaacatggtgaaaccccatctctgctaaaaatacaaaaattagctgggcatggtggcaggtgcctgtaatcccagctacttgggaggctgaggcaggagaatcgcttgaacccgagaggcagaggttgcagtgagccgagatcacaccactgcactctagcctgggcgacagagcaagactctgtctcaaaaaaaaaaagaaaaggaaaaagaaaaaaatatataacactaccagtatgggccactctctgaagacttttaacccccatcccttaagaagtaatcccagcctaaattctgtgttggtcactcatctgcctctttttatagtttaacacatgtgtgtaattctaaaccactgcatgatttggtttgtaaattactggttcagtgcctgtcttccccacttagctgtaaggagagggattgtgtggcccctggtctttgatctgtcctaggctcgagcacagtgcttggcacatagcagggacttcatagatgtttatgaacttgtgaatacataaatatgtttattcttagaaaaatgacgatttctaatatatgaataaggcacatacatgtgtgtacatttgaatcataaagaatattaaatcttattgttgaaccatgaagttaagtggacagctgttagaactggaagacctggatgcccatttctcaaagaaagaagtgaggctcaaacaggtgctttgtccaagttcattcagttagacggtggctaaggcggggccacagttcatatcttctgcctccttgtctaggattctaggccctgtgcactctcaggatggttttatgcaagagatatagacgactttatttgcttaatagaaagtccccactgggggccgggcatggtattcttacgcctgtaatcccagcactttgggaggctgaggcgggtggatcacttgaggtcaggaatttgaggccagcctggccaacatggtgaaaccccacctctactaaaaatacaaaaattagctgggcatggtggcgcacacctgtaatcccagctacttgggaggctgaggcaggagaatggcttgaacccgggaggtggaggttgcagtaagctgagatcacgccattgcactccagcctgagtgacagagtgagactccatctcaaaaaaaaaaaaaagaaaaaaaagtccccattagggaagagggaggacaaacaactaccaaagccctccagcatcacctgttggcatcacgcaatttgataaagtccatgataaaccataaaaagatagcagattggatagtaatatagctaattgtatgtatgtatgtatgtgtgtattttgagatggtgtctcattcactctgttgcccagggtgtgcagtgacgcaatcttggctcaatgcagtctccgcctcctgggtccaagcgattctcctgcgtcagcctcctgaagagctgggattgcaggatcctgccaccatgcccggttattttttgtatttttagtagagacagggtttcactatgttggccaacctggtctcaaactcctgacttcaagtgatctgccctcttcggcctcccaaagtgctgggattacaggcgtgagccaccgtgcccacctatatatgtatttaacaacaatgttaataatatgtattatattagcatattaggagattagagttataatgactttattatcagatgaatttttcaaaatgcccatttgcattttgactgttcagacttcctgactattcaatgtgagactcataagactaaaagaatatcagtgcatgtgatgtgactcaataactttaagacttcagcgtggctcttgtcaggttcacattcatgttcttgggtaggttcaatagaacgttcattacctgcatattttcatttattaaaattaaaaccgaccccaacacagagtgaagatgactttttcacattactttgacttgtacctcaaagacaagccaacaatggcccagctaatggacaggagtgccctggtggcagatggtctggcttgaccctcatggatgctaccaaatgctgagatttcctctcacaggctgctgtagaatgtgccctccaaaatgccaggtatctctgtactgtgttctttaaacatttattgaagacctttgtctttaatacccacccacttagttgcctgtgccttcccaggacctgaaattggatgtaagtcaatgtcaaagaaagtgtccagtgttgttctttaaggaagattatctattatcctgctctaacattcaagtcagcgacccagtgagccccggtgatcatgtatacttcagaggaaaatatatctgcctcagattctcagggtgttatttttagaaaaatacttccaaattgtttgacaccaacatttttcaacttgattttggcaagcataggcccctgagattttaaagtagcttttatcaaaacaaaactagctacttagctatgactgcgtagaattccaaaggttggagagaaccttggtggcacccatactcaaagtagggagtgtggtgcattaatagctgtatgttgatttagtctgcgacgaaagcaatgttcaagccaagtttgtccagcaaggaaaaatgttaagtttctgatctttaaaaagggtgttgagggagatgaaaattaatctgaagcattaaggaatgctgttaaatgcttgttggcaagtagtcctgagtttagccttttatttctcttaacccactgctggggctgcagaagatgacgccagtgattggtaataaaagtctcagtagctgccgttgactgagtgctgttgcagaggattttcctgatgctctcgcaggaaatgcccatagcaaccgcatgagtcagatatcccaatctggcttatcagtgaagaaactgagactcagatcaaagactttgatgtgagacaaaaactggatttggaccctgcctgcctctgccacttttaaactatggcctgggtttcaccatttgtgaaatgaggatgatggtctccacctcaaaaggtggttgtgaggattaagcgagatgatgtatttataacaacacatcacttacaaagtaggaagtgtagactgctgtgggctttgctgcgttcatccaaggtcgcaccgctaagtcatcgttgagctcggtttccagcccagatgtttccagccagatgtgctctgctcttggccttttattttatagttgctgcatcagttcatagcaaacatttcatggaaactgggccatgtggttagttttaggtttgctgtaatgaagagcgccctgggtggaggcagaatttctgggtttgaggtcagaatccactgtcttgtttgtgtgtgtatgacagttttcatgcatgctttccatgtggggtttggaacaaactgatgggcagttttggctcttcataacacaaagtggggctcatcgcatagttatatacagctttgaaaataccactctgtacttctgatgcatgtgatcatttcagggttctgagaccaccccaactcatttgcccatcattatgggacctctgagtttccgggcaaagtgataatctgagcgggcagtcggtagtgtgtgggtgtccctgaaaagtactaagtgttctcctcacttgttcccaaatactcatctcataatgatgcactaatacatgccattattggtgtttgtgtcatttttggattttgaggttgaagttgaagagagatgacagtttaattcttagctccgctcttaaaaactatgggattctgaacaaatttcttaactttagtgagtgccagttatatcatctgtaaagtgtggatgagaatagtatctctctccttgtgtgttaataatggtgcctgcaaaatgactagataacacatgtaaaatgatcagacagttttgggcatctagtaggtgctcaataaaaagtgggtattctatcccagtgatcatgagcacgaagaattgtgtctgttgtatttgtggagagtctactgatgagaagtgtatccttctgcctgtgttgctgtaggtgcagaatgtgatttaagccaaatgcatggcggtgtagcctggccagctgtttacacattcagattcagcctcagcagaaatagcctagccatgaattcacaagaaactgctgagaattcaggatctgagctcactgctgggattaatttcttttcaacagactgactgtctagagaatgtccatgatgctataaatgaaaacatatgttagtataaccaatggcagtgggggaatgggaaagcaatgatgggatattcaggaaccatttcatggagaagaaccactagcttggctgtagctggggcaaagaaaaagacatatttactacaagatccttttgtggcatcttcctctttttttttttaaaggttattttgcattgaaaaacaaaggaagaattttttacttgtaggagcaatttgtgaaacaatgaacttccataacctgagaatgtggcttcatttgagaaatgagattttgggtaaaacaacagtagggagggaggtctctttttagggcccctttggccaccttcagataagctcaatgaatagccaagacaaaaaaattgtaggcagtgttgttaaactggcatttttcttgtaaatgtaaaagtggttgctgtggccgggcacggtggctcacgcctgtaatcccagcactttgggaggtggaggcgggcggatcacaaggtcaggagatcgagaccatcctggctaacatggtgaaaccccgtctctactaaaaatagaaaaaaaaatagccgggcatggtggcaggcgcctgtagtcccagctactcgggaggctgaggcaggagaatggcgtgaacccaggacgcgaagcttgcagtgagccgagattgcgccactgcactcaagcccgggcaacagagtgagacttcatctcaaaaaaaaaacaaaaacaaaaactagtggttgctgtgttgtgaaatacagtgttttgccgataccttaaaatattatgaaacaatgctctttttaattgtatttgccttcatgggttggttttgaaagatgttagtaatatgcataagatggaaaatatattttgtttgtcttttttatagttcccctacctagcagatttaaaagttagcaaaggctaagatcataccttcaactttcttaataaaacagagacccttttggaaatctgattcctagctcatgactgtgcttgacctttgtggatttcttgtactgtatgtcaggcagagctcatgtgggaagttctcttatgactgcaagaaaaggaagcgtagtagaaacatgtagctggaactgtaggccattgtgtgcgcagtcagcctcccttcccagcccccaaatccagaacaatctgtctgaacattagaaacaccagtaaacgttaaagcaacaacccttctggtgggccatttggcaactggtcaaaaatcttaagaatgtgcacagctttgttccagcaggttcgcttctaggaggtgctcttacagagccggtagaaatgaaatgcccatccaaagatgttcgtgaaagtgtggttaatgatcaaagaaaatcataggtccacctaagttacggttcatcattctatacaggtattaaaatgttgataaacatttgttaggaatgaaagtgaatagggacgttgtgctgtattttaggtaatgaatcagtatttaaaattcgaggtttttaaaaaagttatcaattctgaattcatgaaattaagtgagatctgtgaaatatatgtgcgatggggagaagaatggtggttatcagaggcaggggagaggggaaaatgggagtcgtttaatggatacacagttagttttgccagatgaagatgttctagagaggatggtggtgatggctgcaccactgtgacaagtgtgcttaatgttattggtctgtacctttaaaaatggtaaatttttgtgttatgtgcatcttaccactttttttttttttcttttttttggagacagagtttcactctgtcacccaggctggagtgcagtggcgtgatctcagttcactgcaacctccacctcccaggttcaagtgattcttgtgctttggcctcccgagcagctgggattacaggcatatgctaccatgcctggctaatttttgtattttcagtagagatgagatttcacagtgttggccaggctggtctcaaactcctggcctcaagtgatccacccgcctcagcctcccaaagtgctgggattacaggcgtgagccaccacacttggccttactacagttttttttttttttttttacaaggaacaataataaaaagaatgataaataataacaataattttcaaagtatatatgtggatatatatatatatatatatatatatatatatatatatatataccgaaagatttcccttctgaaggaaagtttggttttatttataattatttcagtatacatctctaaaagatcaagcgttcttcaacataatcactattccctcgtcacacttcagatactaaaattttccaaatatcattgaatacaaaggaaaactttgtgattaaaaaacacagcattttaatcaacttaactcaagcatttttggagatggactcatctgtgtatttaaaacaacactagtcttggcagtgtcaataatctggtacgatggaaatgtgttctggaagcttttggacctggtaggattttatgaagggagagagggaatgtgataggatttgctaatctttctcactgacacgtctaattttgtcaaaaatacacattcttcttttcctcgtctgttttgttaccttctcctcattctgtacgcccttctttctgcactatctattatacatctgtttgaatccctctttaagaagtagaaccctgaggctgggtgcagtggctcatgtctgtaatcccagcactttgggacgccaaggtgggtggataacaaggtcaggaatttgagaccagcctgaccaacatggtgaaacctgtctgtactaaagatacaaaaattagctaggcatggtggcatgtgcctgtaatcctagctacttgggaggctgaggcaggagaatcacttgtatcctggaggcggaggttgtagtgagccgagattgcaccactgcactccagcctggatgacggagcaagactccatcttgagggggaaaagaaaaaaaagtaggaccctcattgatgtgtggctacagtggagatatccaagctaaaacttctgatctatttgctactatgttttatgttgaaaacaacgcatagatgtgaagtcacgcgtgtgttaaatagcttgatgtagccattccacagcgtgtacatctatcaaaacatcatgtcgtacaccattgatatatataattttttttttgagatggagtctcgctctgttgcccaggctagagtgcagtggcacgatcttggctcactgcaagctctgcctcctgggttcacgccattctcctgcctcagcctcccgagtagctgaggcacccgcgaccgtgcccggctaatttttttgtatttttagtagagatggggtttcaccatgttagcaaggatggtctcaatctcctgacctcatgatccacccgcgtcagcctcccaaagtgctgggattacaggcatgagcaaccacacccggcctgtaatttttacttgtcaatttaaaaagtaaacttaaagaaaaaacataaatagaacatgagaaggacaggtcatgaaacctttccagactccctgtacttttaactctgaagaatatttagagtttatgcaatcactgcctggcatagagttatatcaaaatgtcctggtaatacaccagaccacgtgagcatcgtgtttgctaatttgtgaccttgaataggtattgtttaatttgataaagtttccaggagtatagattgaggtaaaagatctgaatagtggcaaagatgatgggaaaaatcagttgggtgctgtcactcatgcttgtgatcacagcattttgggaggccgaggttggaggatctcttgaggccaggagatcaagagcaacctgggcaacatagagagactacatctctattgtggggaaaaaaaaaagccaaggtcaattgttcactgttttctgaggctctttcatcctctgcctgacatctaatttcttaccctcttgatgagatgacaaattctagatcaggcaacccaggaatgctgtcatctggtaggatccttcatatgtatttatgtgattttatttggtaattgaatttgagaatttaaaatgctcttgatttcagatttacctaaaaaatcatcagggctgggcctggtggctcacgcctgtaatcccagcactttgggaggccaaggcgggaggatcgcttgagctcaggtgtttgagaccaggctgggcaacatagtgagaccctgtctgtctctacaaaaaataaaaaaaaatctgagtgtggtaggatgtgcctataaacacagctactccagcggctgaggtgggaggattgctcgagcctgggaggtcgaggctgcagtgatccatggttgtgacactgcatgccactgtcacccctgggcaacagagcaagaccctgtctcaaaaatagatatgtatatttttatattctctctctatgtgtatatatagagtatatgtatatagagtatatatataatactctctatatagagtgtacatatctataaagtgtgtatatatacacacatatatacgtgtgtgtgtgtgtgtatcagcagcttgcatttactagtttttaagtgagccttagaaatgtccttaggtggctcccagcatgtcacttggggcttaagtgcagcctgtcttactgctcacatgtccctgtgttgggcctccctcaggcttggctccagaggtttcaccgtgagcaggggaccagtgttttgccccccaggtttcctggctggtgagctggcaccatcttcacagaggcttacagtgtttgattataaaaatggcagtgttcaatttttaaaatgcatattccaagttgtcttttttcctaaatattcctaattacatttgattttttttccaagatggttgcttggagcttgacttattgcatgcttgagagaaagagaaggggacagaggttgttggagtaagtcaggtggagcttggcttaaacatcaggatccaagattcaggtcggatgaagggaaggtggcctgtagaatagtcacggtgcttgagaaatgggaaatttaaagatacctgaaaagtgtgtgtgtgtgtgtgtgtgtgtgtgtgtgtgtgtgtattgagaagaccttggggcagttaccctctgagcctcagtttccatgttgataaaacaagggaatcggaataattgattcttcaaagttctttccttatttaacccactggggctctggactatattaaatgtgtaaaaattgcatctgctaggtgggcggcccatttcaaggaaaattctagaataagtaagccttacattgggtaaatacaagttttaaaaaagcacacacacacgcccctcgtcaagtttcctaatacaagttttacttcacagtctgcttataattctaggtaggtgctgcacagcatgaagaaggtattatgtgttgagttttgttgtatttagtaacccattgctcatctgactgtaaagtctgtcttatatttcaaggtgttactaatcatgggttcacacacccctctgttgcctattgataggtgaaacactgcttcatttaacatttttctttgttgttcttcagtttattccattttggtatagtcagcttcatcctcactgagtttagcctttgcagatatccattcctccctggttacctctgcagcatctgaaagacccagtcagtgatacacagaggtctggaactcaatccagctcaactctgggcctgtgaaagcaaaacaatggggacaaatccagctggcccacgagcacttgctttataaagctgcccacacactcttcactctacttgctttttggtcccctgtttttagagttccctgatgctttagctagaggggctttttcatgttgtttcaaggctgtgagttctaacacgtaagctgcgttctggctttagccactctgtcctgccaagaagctgaccactgtttgaaatcaacttctcatctgcttctcgtcaggttttccagagcccagagaacagtgttgagtcaggccacagataggatacaaaggccaggacacaattccaaatcccagggggctggagagagtcagggccttcagtgtcaatcagttaaacaccgaggcaggaggaagggacattgggagacttgcaggatcctggacttgtgttcacatttaattctgctctgtgtaggggtgtgtattaggactgcaggatggacaggtgtgacagctctatgggaggaaggggaaactctggtgtccgcatcctatgggaatgcacagtgcattgctgcgtggtgacagctgttgatggggcacgctgctcatgcagacactggaaggaaccactgctgtggtcccatgctttgcttttctaggtgaggcctgaggcagcgagagaggagatgcccgggccaggctcccacagagaagtgctggcagagctcatgtgtgggcgacccctggccctgagctgtgggtgactacagcaactgggggatttgtcaggacctggcccatccttgggggaaagagtgttgccttccagaaggacatccgggtgtccgttcaccttgacctcccattggatgcaaccttttggtccatagcatcttactcccctcctcccttcgttgaccagatcacattcctctctatagatttcagtcagctcccactggtatgcatgtctgtgtactttttttttttttttgcctagaaagtttgctttgggctttgaatacaatgggaagggtggataaattatgtgtgggaaggaatttatggtgtcataggaagaacattgactgatgtttgtaaaaatatgggagtttgtaacatagatgatatctttttgatacatgtaacatgctgtgtaggtgtggaggaaaagcaagagaaagaagcaaggcatgcttcgaatttctctgtacagatgattcctgttagtgcgttttgcgttacaaccaacactctcctgagctaatagagcgagaactcactgttgctgtggggagggcatcaagccattcatgagggatccactcccatgacccagacacctctcactaggctccgtctccaactctggggtcacatttcagcatgagatctggaggggacacccaattcctttaactgccctccttgtgctagttttgcttcctataggttgatactgtgcccacccccgcccccccaacttttttttttgagatggagtcttactctgtcacccaggctggagtgcagtggtgtgatctcagctcactgcaacctccacctcccggggtcaagtgattttccagcttcaacctcccaagtagctgggactgcaggtgtgtgctaccgcgccctgctaattttttttttttttttttaaagaaacatggttttaccatgttgtgtaggctggtcttgaactctggagctcaaagagatccacctgccttagcctctcaaagtgctgggattacaggcatgagccactatgcctggcaatactgcattcttttatttgccgacttttcttcttcctccaggctccagacatgtaatgtacaacaccctcagctggtttttgggacacttaagtggctggagggcagcctgtgaatatggtttttctctgtgttgggtgaggtgatcatgtgtttttctattgaagatcatggaaagctgaggtcatgaaggagactcgcaaagactggcagttaaaatggacagaaatgaaaggatcgcattacaggtttcatagaaactggttattccaggcatatgttaatgaaattcacgcattttgtgtttattggaataccgaatggtcatattcactagcattgaattaatgtgttaaagtgaggttttgatgacattagttgcacatgacttttagttgaaaatttttttcaagaagtaaaattaaagcaatggaaatagagccagtaatctgtcaggcctgatctctgtcagacccgaagttaacttaccagatcattcaaattactgttcattagagtgtggaggtatcgggcctgttttggagaagctaagtattacagtggcctggtataaatgttgactgtaacatttataaagaggagttagcacgtcattttactaagtctctgccccttttacagtgtcactttcctaatacagtttcatcttaaacattattattattattattattattgttttttgggacagagctttgctcttgttgcccaggctggagtgccgtcgcgcaatctcggctcaccgcaacctccacctcccggtttcaagcgattctcctgcctcagcctcctgagtagctgggattacatgctgtgccaccatgcctggctaatttttgtacttttaatagagatggggtttctccatgttggtcaggctggtctcaaactcctgacctcaggttatctgcccggctcggcctcccaaagtgctgagattacaggcatgagccaccacgcccggccacactacttttatttataatgtttatgtttagaaagaatccctatgcttatatttagaaagctaggaaggtggaatgggaataattgtattcataatgttttatttctgttattaaaaaacttgaaatgtgagaaaatatttgtcattactcttgtatcatcttttgtacttggatctattttcaagactgttctcaaaagagaaaaaagtttatgctcactattgaaaatttgtaaaataacgaacataatgaagaaaataaaaatcatccatgatccagtgtgcaatttcaatacacagtttttcaattagcaattgctctttgaagcaatctcttctaaggaaataggtagatctgtgtgcaaaaatgtagcccagtagatgtttaatagtaggttattgagtaaaccatggtacacccatcaagtaatatgttctctgaatattaaatgatatttatcttagaattgatctcacatttgtgaatcttaaccttttatattgtgacatccttcaattgattttccttttcccatttatttttagtgctccccccccaacaacattttattagtttttccagctagtttggaaatacaatgacttgttataaccgttggagcatccttgattctaacttttactaagttactaatttactggtggccttgcacaaatcaccttccattgtcattgaataagtcaccattcattgagccccaagcactgggcaaaagtgtgttaggcagagggcacaaggcaggcatagccagactcccacagagctttgggtcatctacctctgccctaatgtgctaacctgcaaaacggtgctaatactatctacctcatttcccacaagctatttagagattagctggggagatgctcttggcagtatggccatacctcctccctcagggcccccaatcctcagtttctctttctgtagtttgttaaccttggtcaactgtggttcaaaaatgttaaagggaaaattccagaactaagcaattcctaggttttaaattgcatgccattctgagcagcgtgatggactctcatgccatctcacttcgtcccgccagggacatgaatcctccttttgtccagtggatccatgctgtccgtgctccccgtccgccagtcactcaggagctgccttggtgctcagaccgactgtcgtggcaccacagggcttgtgttcaagtcacccttatttgactcttgtgccccaaggcacaagagtagtgatgctggcaatctggatatgccaaagagaagccatgaagtccttcctttaagtgaaaaagcagaagttctctacttaataaggaaaagaaaagctcaaataccaaggttgccaagaatgcattctatagtaagaattctatagtaagaatgaatggtaagaatactattgattagtaagaattactattcaatagtaggaatttttattctatagttagaattcttactattcaatagtaataataagaattactaatatcgaatagaattactattcgatagtaatcattattattctgtagttcgaattcttactattcattctatagtctcaggcattatcccatttgggaagtccacgccacctctgtacctctgacatggttaccgaaccttacaaactgtattcttagtacttgcttatctagcatggtactcagccaggctttgggccattaaaggcaagatcctggtcttagttaactttgtaacccaactaggtgccagtggtgttcccggcccacactagtgctcgtaaagtgtttgtggaaatgaactgaaggcacttaggaaattatacagtacaaagcatgtgaaggtggtattaatgaggacatctcagtgtggtgtcttgactccctgggtatggccaggtgttattgttggacaacagattgtgatatttttgtgttagcgatgctggttagtgcatgacatacacccacccacccacacccctccttcctgaattttttttttttttttttttttttttgagacggagtctcgctctgtcgcccaggctggagtgcagtggcgggatctcggctcactgcaagctccgcctcccgggttcacgccattctcctgcctcagcctcccaagtagctgggactacaggcgcccgccactacgcccggctaattttttgtatttttagtagagacggggtttcaccgttttagccgggatggtctcgatctcctgacctcgtgatccgcccgccttggcctcccaaagtgctgggattacaggcgtgagccaccgcgcccagcccttcctgaatttatatacgacatgtgagatcatatccagctgtttagacacacacacaattaggtgattttaactgtgcttctctgagctacacccatcccttgttgcttaactgtaaaaatgtttatttaatttctacttgcaacaactcatgtatatggggcttctgttctgctggaagctctggatcctgtggcgtggggatgccgtcacagacttcacagtctgatagaggaggcagctgatataagtgccacctccatatgtcaagctgcatgtcagatggtacgctgggactagttgattctctgtgacttgccgcaaaagttccttgccacagtaatcccttgtttcccaagggtgatgtagatcatcctatgtgacagtaacaataggctaaaaacagccaaaggacttgaaagcgcttttttttcccatttttttttcctagagtgactgaataatgagggcaaaatgggtgtcagtgggcatgaaatgaatgaatgccatttgcaccaacctgttttagatgaggagggtgggacctggtgaggagtgaccactgggtgagcattctgtgtcaatggatttccagctcacattggcagcgatttgtacattatttcatcccattcctgtgtgatccatctgaaaagccgcgagacagagggacacacattcattttggtgtcaaagatctgggcttcagtcccagttcggccacatactagctgtgtggtcttgggcaggtttgctctctgggcctctgtcctgctctgtaaagcaggattcacaatagtgaccttgtcctttggaggaagtaggaggtgaagtccctgggcccagctcagcgtccacagcaaactcctatcaggcctgatcaccctggtgtgaacattaacccagaactagcttacttacttgctctgccaagaagcaagagttctgggttggtctgaactactctttggaaaaactacttttggcagatttcaaaccagttcctaaaatttccatgtattacatttagattaaagaggaaaaaacaaccccaagatgttctttaattatcaataagacacacattgaaaattctacacggatggcatgaggccgggcgtggtggctcgcacctataatcccagcattttgggaggcagaggtgggtggatcgcttgaggtcaggagttcgagaccagcctggccaacataagtgagaccccatctctactaaaaatacaaaaaattagccgggtgcggtggtgcacgtctgtaatcccagctactcaggaggctgaggcaggaaaatctcttgaacctgggaggtggaggttgcagtgagccaaggtcacaccactgtactccagcctgggtgatggtcaagactcccatctcaaaaaaaaaaaaaaaaaaaaaggggtggtatacaagtgcagagaaaggggttattatttcacctaggtgttaaatgaatagcacagtaagaaaaaatatttttacctaaacggtttcagccacaggctaaatctggacaagggccaccactatgtttttcttaaagatacactcacactctgacttaaccctttgataccgtggcagcatggtgcagactgactgcagttgtctttggggcgtgtcttcctgcttcacagtaactgctttcactgctttgagtaaacttggcctctgcacctctgtctggttattggctggatgtggaaagggccggttgtgtcggccgagcccattttcccttcggtggtgttgtaaatgctttctgtagcctgtccagactgttttgctcaaacctgttcttgacttttctgctggtctgctgctgtggttgggggttgcagacgctcccacccccccatatccttcccaaggttggactctcggcctatggagggctgctgatgaggcccgtggatccttctcaaatccagtttctatatccttattggaaaatgttccagccccgtaggtccacacaagctgaagggatgtgcctcacagttcagaagccttcaggcaaggtcaacagaaacacgacgggaatccagacagtgtatgtcccctcaccctgcaggcgcagccgcggacctcaggcctttgccttcccaccgaggactgcaggacgtgctgggttcctggggcctctgatcctgggccttgtccagtgatgtctgactgctgtctactcacttttggttaacctgcagtacacctcatatcctgtttcaaaatgaaattggaaggtggggctccctcaggggcagcaaagctacagcttcaaggccagacacggatacttaaaaaaatcttctaaaattgtggtagagtacacataacatacaatttatcatcttcaccatttgcaagggctcagttgggcagcattacatacaggcacattgttcgacctccagaactttttcacgctgcagaacggaaactctgtatccatttacatttttaactggttgaagatggaaaaagaaggctattttggggacatgtgaaaatgacatgaaattcacatttcagtgtccagagatgaaattttattgactaaagtcctgcccatttgttttggggttgcctgtgggggctcttgtgccacagcagcagagtcaagaccaagtggaccacaaagctgaaatttgtgctgtctggccctttgcagaaaaaggttgccgttgcctggaataaataggtttgcatgtatggaggattcagctgaagataaggccatggggttgggtcagcaggaagagatactggccagcagaaacctcttcccactccccaaagcacatctacgctgactaaagattctgtttctcccttctcttttattttttgagatggagtctcgctctgtcacccaggctggagtgcagtggcgcgatctcagctcactgcaacctccacctcctgggttcaaatgattctcctgcgtcagcctcctgagtacctgggattacaggcgcccaccaacacgcccggctaatttttgtatttttagtagagacagggtttcatcatgttggccaggatggtctcgaacttctgacctcaagtgatcctcttgccttggcttgccaaagtgctgggattacaggtgtgagctactgcatctggcctttcccttctttgtgtgtgtgtgtgtgtgtgtgtgtgtgtgtgtgtgtgtgtatacagcttcccaagtagctgagactacaggtatgtgccaccacgctcggctaatttttatttatttttatttttttatttttatttttatttgtagaaacgaggtttcgccatattccccaggctggtcttgaactcctgggctcaagggatactcctgccttggcctcccaaagttctgggattacaggcatgagccatcatgcccagcctctcccttctggtagctgagttaagggactctgtggatggctttattgtgcagctatagtatttaataaatattggtaatttactggctttgttttaatattaaaattatggtaaaatgaactgccctgacccttgatatgcttgtttctaccctaccttccctcagtcagtcaacctcatctaaatatatctccctgcagttctaatggtgatctttctaggtgaatgtcatgagctgctttttgatgctctttcattatctgtgaaaaaggataaaagtagttaagtggataacttaagtataaacaaaatcttcatggattcttttagcaggaaaatgagcttgaattgagtggtcatttctgttcattaagttcagattttgaggccctccccgccaagatgattctagttactagtgcttacattcgtgtactgtgttctaagccatttggcatctcaacagactcatccacagcagccctatgaaattgatggggcagatatttctatttgcttttggcaaatgaggacatgaggctcatgaggggcctgtcaggcccagaaacactgaaccttgtcccactcttgggtcaacataatatttagctttcagtgactgctcattcttgaccttgttgtttgtcaaggaaggggttggggaagagaaaatttaatttgttactatttttcttaactactgggactatattgcctgagtgagtggtcggggggtgtcagcgaagatgttggttcaggtaagaataaaattcagttgttatttatttaagacttaccatgggctgggcccagtggctcacgcctgtaattccagcactttggaaggccgaggtgggtggatcactttgagttcaggagtttgagacgggcctgagcaacatgtctctactaaaaatacaaaattagccgggcttggtagtgcacgcctgtagtcccaactacttgggaggctgaggccagagaatcacttgaacctgagaggcggaggttgcagtgagctgagatcactgaatctaactgaaaggcttttgagaataggtaattttatagaaggagaaatgcagtacataaaattggctttatgtttatcttgaataccaagaaaattgtttttcttgggtaaatttaggtgattttccagtggtgctttcttgcacatttgaccatagaagaacatgtgttaagcccatcccttctcatttggtcaaggtccatccttggtctctatgacagttgaatgaagattgagctgttcacacatcctcagtaatatacaagtagtatatccgtcaaaagggttttgtgcttattttccaagagctctcggtgctctaaattctttatatgaacatgtaagattgcacatctggttttaaatgtggacatgggcattgtagggtcctggtttttaaactattcatgacttacaatgcctcagcgtatcttccttgggagaattcattttgttgaatgctcatcctgaggacgcagctcccttcctagaaatgaggtagctcctggcaccttgagagttcctctgtgtgcaggaaaccgatgagtttgcagataccagcttcatgatagcctgactgaaacttgttgaggagcaatgcaggatggtgaatattttcatgatctagatcagttaactcatcctgcacatggctaactttatgtcatgagaacagatttcttagcctgagaattgggacaacttagaaattgggaaactaagcatgtatatcttttaatttttttcttttctctcttctcttctaaatggaacattcacgcaaggcagtgtacagagatggtgtggtatactgcagagagcaggggccccgagggcaggccagggtacgagtctagatgccaccctctgagccatcgtttcttcacggttttacattgctgtcctctgaatcagaaatcatgatgtaagacgaggcgaattgcagttgtgtgagctctcttttcatgaagacgattatacattttgctgatgtctcaataatttcccaagtcaggatgacagaagagctgaaagcagcctacttaggattattcaaggaaatgaaagaactgtttccttcattcataaacacctgagagtctgctctggcttagacactacgctagttgttgagaaacaactcaacaaattaggccgagaatctgccctaatgaaatctagagtttggaagagagaacacatctacaaaccagcacacggtgacgacttttttccaaggacccacttggcgtcatttgctaaatgctcctcttaacggtggtgagtcttatctcctcttacattgacagtactgacaagtatacatatatatatttttaaattttactttaagttctgggatacatgtgtagaacgtgcaggtttgttacataggtatacatgtgccatggtggtttgctgcacccatcaacccgtcatctaggttttaagccccacatgcattaggtatttgtcctaatgctgtccctgccctttctccccacccctcgacaggccccagtatgtgatattcccctccctgggtccatgtgttctcattgttcagctcccacttatgagtgagaacgtgtggtgtttggttttctgttcctgtgttagtttgctgagaatgatggtttccagcttcatccatgtccctgcaaagggcatgaactcattctcttttaaggctgcatagtatttatggtgtatatgtgccacattttctttatctaatctatcactgatttgatagactgtatatcagtatatcactgatttgggttgcttccaaatctttgctattgtaaatagtgctgcaataaatgtacgtgtgcatgcttccttatcatagaatgatttataatcctttgggtttatacccagtaatggaattgctgggtcaaatggtatttctagttctagatccttgaggaatcgccatactgtctcaaaatacatttttttttctttttctttttgaggtgtagtctcgctctgtctcccaggctagagtgcagtggtgcgatcttggctcactgcaacctgtacctcctgggttcaagtgattctcctgcctcagcctcccaagtacctgggattataggcgcctcccaccacgccagtctagtttttgtatttttagtagagatggagtttcaccatgttggccaggcttgccttgaactcctgagctcaggtgatccgcccacctcaccctcccaaagtgctgggattacaggtgtgagccacctctcctggccaaaatacatattttttaagtacctcaaaatagcccttttgcacgctaatggaaagcccaacagtcattatgatagagaataatcttcagtaaaagataaggaggaaattttaatttgggaacccgttcgtgaaatgcatacccttctgttttccctctgacttccttgtcctttgtgtttaggagcttaagggatccttctgtttaagtcactaggggctcaatattaacgtgcagatatgtggggaaaatgtcacttgtttggttgcagttttgccagctctaaaatcagttggtagtggctgcctggagtatcttgtcctgaaagattgggagtttgaattgaggatcaaagggggtgtcagagattagtgatgtcttctgtcaggagggctggttgccatggttgctaccctggcttgagctcctatcagctcacatttcagagatgattagtgaggattataaggattgggctcagagtggggccatggggcagaaagaagacactggctgaactattctgaactcttaatgggcacccaaaacaagtatgttcaattttgtcaaaagctagaagggccctggccacacttgtgttaatggaaaaaccagactccataaaatattctaaagaggtatattctgagcgagtatgagagactgggaaacgtagtctgaagaggtcctgagaaagtgcgcccaaggtggttgggttacagtttggttttgtatatttcagggagacaggagtgcaggtgaagacatgaatcaatacaaggttagtatgcgttggtttgccctgaaaaggtgggatatcttgaggcaggggcttataggtggattcagagattcttcaatgtgtcattggttaaaagagtaaagctttgtctaaaaatgtggagtcagcagaaaggaatgtttaagataaggacgtctgttaaccaagatactgggtcagagtcacctgtagggatgtgggacttaatccttgtctgtttggccttaggtcctttgatgtcttgctgtcacaaagagtctgttttgcgaatcttatgatctctagtttaacattaatgctggtcagttgtgcctaaactccaaaagggaggggatgtaacgaggtatgtctaacctcccttcccatcctggccaggaattcagttcttaaggttcttctgaggtcccgttagccaagaggcgtttgttcagttggtggagggcttaggaatttctttttagtttacactgaaatgagctgtgcaaggcctggggcctcatctctctaacttcttgtccacggaagcatctggcacagtgggcattcagtaagcgtttgttgaagtaacagtgatgaaaatcatattctgttgataacatagctcgtgtgaagcagcaaatgctattttgtgtgtagagaaatagaaggtcagagcccacaatgaactaagctctgtgagggcctccagggagacctccaagaagttcaaggtcacacagtagcgggcccagcagagcagggatttgaacctaggtttgcctcataacaaagctcatcttctttcccccacaaaaggaagtgtgagaatgatggcggtcaatgacagacttagccacttataatcagtttttgtttaaaaatgacaacaccatggtttgacctgggtagggaggaagaaatggagtttgctaggtctggctgttgactgtggttgcttctgaggggacagacttttcagggcaaccaccctctccaccagcatacagagattgcttttttaatctaggattgcttttctcgtcatactttgtccctattcagatgtacctgtaggcctggttattttgtctgtgtgattgttagaggaaaaaagtgaaaagatttgaaaaatgatcaagaagagcacgagatatccccaggttatacagagagattccctggaggctttgttggcgcacagggccatgcttggtttagaaaaggcagcgcggggcagcgtggggctcctccggtttctctttgtctgaaatgctgagtttcacaggctccttactgagttcagatttccctggggcagaagagactgagggaggaaggaaggttgccgtttatttcattgattaatggcaacaactgcaattacttttgcaccaacctaatatttctacgataatagttttttttttaacacagcaaaaatcagggattgaaagtttgaaacctgagcttttaggcaaactcctcccctaaaagtaaacaatgagataaacagcagccttttaatggaaaaaactgcaattacttttgctccaacctaataatttactttctgaaatcctccccagcagacttcctaaaatcaaagtgaccggatggtcccattgagaggatttcagtctaaacataaaacactagtaaacgattactaaccagctcccaagttggtgaccatcaaaaatctcacatattaaaagctggtaccagtatccttcaagtaagtgaaaacctcctttaatatgttagggttttatctggacatcaggtaaattttgtattcagatcagatcactttattctcaaggttttaatttaggtcagataatagatgcttggctataacactatctgtttgttcctaaagtaatatgattgtattaaaaagtgttcttcagccatgcaatactgtattcatcttgccatccttgagtgagtcagtgaattatcttgtgatacaggactgcatttatctgacagatatcttttgaaagtaacatgatatctgtgagaggtctgaggctgtgatttcactttggttttctgtatgtgattctgtaataagttaatgccttaacttaaactctaatgttacagaatatcgtaaacacgaacagatgaattcagattccttttcaaaagtagatttgacacactgagctatttatgcatggaatacatgatgtcagagatttgcttccacatagaataggtggcagtgaatgtgggtaaggagagagagagagagagagagagagagagataatatttatatatttttatatatattcatatatatatatgtaggtgaaacaggattggccatgagttgatgattgttgaagttaggtaatgatttggtaaatattttaaaatattttatgaatttttaataggtttaattgtgttttcctaaaggcaaaatctgacaagcttctagggaggagattggcagaatagagtaattcctaacattgttagagtttgaaaggaaatggtccccccacttcttttctctttctctcttttttttttttttttttgcatctctgaaagactgagctgaacgattgtgacaattagttagtatataaaatgtcccactttcctggtgagtggttgacattggtggctaagcaatttcaggcatgagaagagaataaacctttactgattaatggttgacttgtgacctcctggtcactttctgggctggcagcagcatgatttgtgtaacatttaaacatagttgagaatcataaaatattcttttcatgcattgatttcttaatgcatttttgaagtgttttcattaagactggaaaaattatgatctgtgtgtgaaactgacaaaggtcggcgggggtatgatggatgtcattatggaaagtcctaagtgatcatggaaatcccttcttcctttttctgaggcatacaggcagatggaattctgccttgtttcatgttgacatctctgcatgttcattctgagaggctcacaggatggctggcctggctatccctgagggctcatggcctgtccccagaggaattaagcatagctgaaggctagccttccctctattgatgtaattgatgaaatgaggaagcaagatgctaagaacaagacccatttctcaattattgagtgttgtagagtctctgaaaaagatatttagaagcaccagagcctgctaattttgcctggggtttaggatttatatataaccaatgagacagagcaagaattcccttttgggcaatatggtctactctgccctgtttatggagttgttgattcataatattatggcataacagttgaaaaaaagcaaaacacaagattataggtaagacttgattacaaaagctatgtgatgattttgtactggtacagacaaaagagaggagctaaacaaatgtaaaaataattgggttagggtagaggggatgtggataactttttttcttgcttaaaagcatctttattattatattgtttttacgtttggattttgtttacaaaagaaccaaagtaagtcatcttcttggtattcaaaagttccaaagatggaattttcccatcagagtgcgatggtttaaatagaagttaggttcctaggaagaataaatgaaccataatataattgcataggatgtagaatatccattgctttccccaagaccagaatgatacctctcacaggcaatgcgaggagtcctccacccctgccacccacactgggtgtgtgacccagcaagggggcatgggtggggtgggaggaaggtaaaaaggggaagaccacaatagctgttcatatacaggattatttgctattctgttcttaaagattgcttgatattttgttttgattgcaaaaggtgattgatatgaaaatgtcaacatttcaaacacaagtattcgttttgttcaaaatgtttgttagatcaaatcagaatatgatcccagaacatgtctgagctcttggatctgctctagaaaaatacacacacacacacacacacacacacacacacacacacaccccatatgtatatattagaagcagggagtggctctgtcacccaggctggagtgcagtggcatgtgtggtcatagctcactgtaactttgaactcctgggctcaagtggtcctctggccatggcctcgcgtgtagctgggactgcagacacacaccaccttgcctggctaatttttatttttatttatttatatattttctgtagaaacaggatcttgctttgttgcccaggttggtcttgaactcctggccttaggtgatcctcctgcctcagcctcccaaagtgctggttttataccatgcctggctttagaaagaaatatattaattaacatctacaaagagatgatccatgtccacataattggttctgcttattcaacaagccgtttttcagtgctgagacttcctctgaggaggtatgggtggtggcgctgggaaaggggtgaggccttctgggagaccttcggggacgccaccttgagggtggagtcctgtgctagtggcagagcactgtttagagtcagccgagtgagtctcagttccctgggcttgttttatgcatgcggcgcctgtttcaggttctcaagaaacatggtattcagttcattgagagcactggttcttcatgccagctgcctattagaatcatctagaaatctcttggaaaacatggatgctcaacttccaccccccagaaattctgattcaattggttgggcgggggcctaggcattgttatttctgaaaagctttccaggtgattctattgtgcagcgagggtcaaaatctggtgatctgttatttaacaagctattgttttaaatggtcaaaatctggtgatctgttatttaacaagctattgttttaaatggtcaaaatctggtgatctgttatttaacaagctattgttttaaatggagcttaaggggaagtattactgtgactattcaaaagagctgtgttttcttctaccggtccacagtgagactttaatatccagggtgtgtgtatgagtgagtgagtgtgtgtgtgtgtgtgtatgttctgtgtgtctttgtgttgtgtgtgagtgtatgtgtgagaacatgttgtatgtgtgtgttgtgtgtgtatgtgtatattttgtgaatgtgtgtatgtatgtgtgtgtgtgtgagagtatactgcaagtgtgtgtatatgtgtgtgagtgtgaatgcgagagtatattgtgtttaagtgcgtgtttgtgtgcacgttgcatatgtgtgtgagtgtgcttgtgtgagcattgtgtatatgtgtgagaatgtgtgtgagacagtgttgcaagtgtgtgagtgagtgtgttgtgtaactcaccagatgaccctaatgtgcaaacagggttgagatccagagctgtgtctgagtgttgtctgtgtcctccctggagaacatccttcgttttctggttcggagtgtatattgattggcataataaccactactcatcagtaaacctgtgtaaagacccataagacctgctagctgggaaaatggtagatttttcacttcttcacttctacatttctaccttgtggtttcatggactatgtcataaatttattaatattaattatgaacacttatgaaggtgttttgatacctgctgtgacgaggctgcattgtttttcttatcattttaatgttatttatttatttatttattttgagacagagtctccctctgttgcccaggctggagtgcagtggtgcgatctcggctcactgcaacctccgcctcccgggttcatgccattctcctgcctcagcctcctgagtagctgggactacaggcacctgccaccacgccctgctaattttttttttttttttgtatttttagtagaaatggggtttcactgtgttggccaggatggtcttgatctcctgacctcgttatctgcccgcctcggcctcccaaagtgctgggattacaggcgtgagccaacgtgcccggcccattttaatgttttttaatccagataggcagcatgctaaataaatagtaaatttctaagtacaatagaaaaaattgctcatgaaatgtgccagtattaacatttatttcttccattacattactttgaaaattttgtagattcaagagaatgttgaagtggtggttacttttgttttccacattgattctcttcactgagaatgttgaaataataatgattgtgaagtgaaatttctttttattaatgcaattaaaaatttgctcccccttgcatatgccatttgaaacaaattccacacatattacagttttacagcagtgctgaatggtggaactgctgtgatgatggaaatgttctgggcttctgctgtttcagtagccactggaaatgtggttctggattgactgagcaactgaattcttaattgtatttaattttaattaacttactagccacatgtggctagtgcccgccccagtgggcagagcacgtgcagaggctggttctgttcggcttgagaggagcttgggtggggcccctgcagcagagtgacagctgccccaggggatgtcagggacatcaccattgcatataccctggtaggtgggttgtcttctgaaatcctgtgccttgctactgttactcgtagaggcttggacaagaatcagtgatcccaagaaaggatgtaggatgtggctttgtggggtatgacgtagctcagattgaagacttgtggccccggtaccaggcgacgccccccctctgtcttccgggtctcccccacgttctccgctgtctgaccctgatgtgcccagcacctttctcaggtgttttcagcctctcccttgctcctggctcctcccagggggaggtaaccattgccacatcagtgcccctgtgccctcccctgcatgccctgctcccagccatgcatgtcgcctccatttcctctctgcctgcagtgcccgtggctcccctccatgacctcaatgctgactattcttttgaggaaatccttctttaacacacaaatcagctggcgtcacttctgcttaaaaaccagcagtggcttcccctagaaaacagcctcctgggtgtgcttccggggtctccgggatcaattcccccatgccctccccctccacacccagcatcagctggttttccagcccagccccgagcccccacgggaaatggcccgagctggtgcagcctcagctttcaggcctcggcggctgctctcatgccttcctgagcagttctgccaggcttcatcccaggctcactctttcctcatgtcttggccgagaagacccttctttaggtgtccttcccatgtgctccccgctcaccccagctctctgtctgctcctgtctgtgtccctgttgaatccgtatagctgcacagagcctggccggacacccggtgtactgtcagcacccacgactgtggtaaacgagcaacttgaacaagttcatcatgtaacccaaaccctggggggtttctgttcacagacacttcttcaaatcctaagtttgacaaattaatgaatttttccagaaaactcaactgcctggacttcatccctcaacttctttactgatcgtttactcaattccattgactccatttttattcttcattttacaaaagcacgatcgtattctttctctggatgttattagcccacttatttagggcccatggtagtttaatcagagaaaatagatggctgggttcgttctgagaaaagcaaaaatacagagagggatgtttttgttaggagtgaatttttaaatttacacctaacatgattaatgtaatcctaatctgttactacttaatgcaattaaaacttttttggacaattatgtattataaatagtaaaagcaaaaatatatttattaataatggctagttataaagtttatttcaggttgggctcagtggctcatgcctgtaatcccagcactttgaaaggccgaggtgggcagatcatgaggtcaggagttggagactagcctggccaacatggtaaagcctgtctctactaaaaatgcaaaaattagctgggtgtggtggcacgcacctgtaatctcagctgagtaggaggctgaggcaggggaattgcttgatcccaggaggcggaggttgcagtgagccggttgcagtgagctgagatcgtgccactgttctccagcctgggcaacagagcaagactctgtcttggagggaaaaaaaaaaaagttcctttcagcaagcttgtttaagaaggcatagctttttagtggctcttgtatgtctattcatttccatcctctttaatcacagtgcagttatttgcacctggcctggatctccttattgccctcctgtcagggaatctgtattcactacagtccacattcactccatgtctctaccttcccatacaacaagcacaagaaagtcactaaaagtggagcatcaaaatgcttttacctctagctaattttaaaggtaaaatgaaaatgtactaactgcaaacaagaaatctgctccatggtcaacattaatgatgagtctttggcatttgacaatacaggggagtgatattcctcagctgttatgaactgcgaggccctctgattattccaagaattatctggtacccttgattctggttaatagtaagttacccagctaattttctgttaactgaaatttggacttcagctgttatttggagggcacgcatcttactgcctcaacttcttttaaggcagatgtgaaattctaatgtggggtccgtggggcatgaacctctgaatgcatcacttggcagaaatcctctgcccatcagccgagtactttactccttagttcctcattcaaaacatgatgaggccgggcgcagtggctcacgcctataatctcaatgctttgggaggcctaggtgggcggatcacttgagctcagcagttccagaccaccctgggcaaaatggtgaaaccctgtctctaaaaaaatggaaaaattagccaggcatggtggtgtgtgcctgtggttccagttacttgggaggctgaggtggaagggtcacctgagcatagggacctgtgatcacagcactgtacttcagcctgggggacagagtgggaccctgtctcaaaaaaggaaaaaacaaaaaacaaaaaccccatgattaacaaactcaattaacctacacaggcttagttattgttcctaggacatagaaggttggaaagagatagagcaaagtgagctgtgagaattgatagcagaggctctgactctacaaaagtaaatagtaactcaaaagttgacaggcttagaatactatagtaaaaatagtaataataatggatgtttgataaatggtctaagatcagttctctctctaagaactcaaggaattataaacctactcagaaattatttctatcagaggattaaaagatttgaccttaaaagagaatttctgggccaggcgccgtggctcacacctgtaatcccagcactttgagaggccgaggcaggcggatcacaaagtcaaaagatcgagaccatcctggctaacatggtgaaaccctgtctctactaaaaatacaaaaattagctggtgtgcggcacgtgcctgtagtcccagctactcaggaggctgaggcaggagaatcgcttgaacccaggaggtgaaggttgcagtgagcagagatcacgccactgcactccggcctggcaacagggcgagactccgtctcaaaaaaaaataaaaaaaaataaaaaattttctggaaaattctctcctgtcaaatgctttattttttttgacattgccataaaaacaatatgtcattatacctactatcttagaagatgcattttactgaaataatcatgcttatcagtatgcacatgttattatgcatttctctgtataatgaaggactttatgtgcacttgagcgaatttgtctacaccttaaagaggatcattttgacttgattgaacaggataactctgcataaatgctataatctatatgctttgaaagtggctttcctgtcatttgacttagttaggaattttcataaggaaaatcaggacatcttcattctaaggagaaaaccaaagggaagttttagaggaagccgttcatgcaaatttaaggtcaagaaagactaaaattacttgggttttgtcttcaaattttttagaacagtagaatgcaagaggctatcctggaaaatgccatgtacagcaattaaaagcttagtcttctccccagaagcctaaggatgcagcagagtttaccgaagcccttgcagagaggcaggataataaacagaggctaccaaacaggacagaatccaagtgttgggtgttctggcgttctaagaagctggttttgtttctgtttttttcatctgagaaaaatctttggataataaaccttccgattttatcagcctattcactaatatttttaagatatttgttcttgctttaggagaaagcaccctgaaggttgtgctcttctataattagcatatacctttaagtgaaattttcctcagcctataatgtggttagtttatatatctctgcagatgaagataattacttagcttgtttatagaatacactgccacaaatatgggtatttgctgactataattaaggatgtacaagttactgggtaaaataaatcccaaaatgttcaaagttagaattttctgtttggaagggcagctaacaaagaaggtaggttgtgtcctttaaatctatgctgtgcagtgtggaagggctccagcaacatatagtgatttcagtttaaatgaaatacaattaaaatgtttgctcctcagttgcactggtcatgtttgaagttctcaatagcctcatgtggctggtggctgccatattggacagtgcagatatatctagaacaagtttgtccaacgcccatggcccaggatggctttgaatgaggcccaacacaagtttgtaagtgttcttaaaacattatgagactttttgtgtgatttttttttttcctcatcagctattgttagtgttagtgtatattatgtgtggcccaaggcaattcttcctcttcttccagtgtggcccagggaaaccaaaagattgttggtcaacacttggataaccaatgccaccaccttccttctatgtataaatgtctttaaatgaccaagatgatacatatccataacttgcccttcctatgccctgccccatccctgccctcacctcacggtacctaggcaacaaacaaagctaaatccctgagaagtgttcccccaacccgagagctagacatttgatccccaagaactaagtggctaaactggcttcagcagacacatagatatttgggaaaaaaaatagcagtctcattacggaattagatgaatgaacccattgctctttttcttcttctgattacattaaggatatctagacttttccaaatgcccagtctcaagtatctgagttactgactccctttgtccctcaatgttttttcctgattatatttgcaagtgaagtttgtttctactctcagtgagttgagaaaattaatttctaatattcagaggatctcagtctgcctcagagtaatttgagtgaagtgttggattaaaaccaggctctggaatcgttcttcctgtgccagctgctagctattgactctccttgagctgaggcacacttcttgctagttctctgtgtacgcatttcctattagacagatgggaaaatgtcactcctgttaacagaggtgggcccccttggacctgaaagccacacagagtctgtctaatttatggtctggccctagatccgactttggaatgaaagattttgaaacctgcttccatgttgctacttttccaaaaggtgcgagtattattattcagtagctaaaaggtaatgctgcagtgctcatggaaatgcattccattcaatcaagcaggcagtctagattgtaacaatgtgcatgtccccttattggacttaacaaagcttttttattttgaagggaaaaaatgtaacatgtacacattaaaaaattttaaaatatggaatccctccccaccccccataacctggaggcattcttacttataagaagtttaaaaaattgaaataaaacagattaatgtgtgttttctcgtcatgaatgctagctcctttcctttttctcctaatctcctcattttatttcattcagaattttctgagcatttttttcttcatctcaaagagcccctgggaagctgcgtggttgcttagtgatgtcactcacagtctgagaaagccaggtgcctgctagacattaaaacatgctcattatccttcctgtaatctgctgccttgtctcacagaaatttgaaacctaagtggatcctggttgtaatgaaaagaatcatcatcagccctttttacatctgacattggggtaattttgttttgcgtatttggtctcaactgctttttaatccaacaggcagcattcaaacgactctcttcctttatggagatgatcttgttcaactgcttccgctgttattagtcttaagagttgaaaataaaatgcttatagtaggaagcttactaagaagacaagttgttgcttttcaaccatcgtttgggagtaacagtgaacttgacaggagtcagtatttgccagaaaaatgatcccaagccttgctccaggctactgtcttctcacccactgttccacggccccttcctggcccgtttgggggtcccctgtgtctatttcaggccacgtctccctctgcatgcagacctatgtatgccgcttcctctttgctgccccttaggtaccctgagatcagtatatctaacactgaattgactctctcactgctcataataccttattctttcctcgcttagaacccctggcctcactgtcccttccacccagtctgcaaaccagaaacctgcgtggcccatgggtttctcctgcccactcgtctcttgtagccaagcagtcaccagatcttgtgatcctgcgtctcgttatctgcccctctctcctgcatctgctccttcctgagcacaagcctcattatttcatagagccctcctgtgaccagctggtctttctgcctcccttagtatctgtccccttgatatggtttggctgtgtccccacctaaatctcaacttgaattatagctcccatagttcccacgtgttgtgcaagggaccccatgggagataattgaatcacaggagtggtctctcccatactgttctcatggtagtgagtaagtctcacacgttctgatggttttataagggggttctgcttttgcttctctctcttctcttgtctgccgccatgtgagacatacctttcaccttctgccataattttgaggcctccccagccatgtggaactgtgagtcctttaaacctctttcttttgtaaattgttctgtcttgggtttccctttatcagcagcgtgaaaatggactaaaacaccccttttcagtccaccctactagagacaacacattgattaccgatggactcattgatccagtcaacatttactcagtacctactttgtcccaggcacttcttcttgttgttgtttaaagaaattagcttttataaataaaaagaacaatgaggaagaataataacagaattttggattgatgggcttcagggatccttgctgtactgtgagcttatccagtcagattttgtttccatgatatcacatcattttgttacctgagccaatttaattaaaaaactctcatactgtttatgtagcatcgtactgacccaacctgttgcaatttaatctttgcatgtgttttcatgacatgctcccaataaaacaaaacagaaaccagtttctgctatagtcactgtgctttgcactacagatacaaaatgttcgcttttcctttcatcttccaaatatttttgttttctctgcaaaaagtcaatgtcataggcatttgtcctttccaaattaaccatcagacatgtcttttttttttttttttttttttttttttttttttttttttgagatggagtcttgctctctctcccaggctggagtgcagtggctcagtctcggccactgcaaccttctcctcccgggttcatgccattctcctgcctcagcctcccgagtagctgggactacaggcgcccgccaccacacctggctaattttttgtatttttagtagagacggggtttcaccatgttagccaggatggtctcaatctcctgacctcgtgatccgcccatctcagcctcccaaagtgcgggattacaggtgtgagccactgtgcccagccaagacgtgtctttaccatgattattctgactttgcttttacacattggcaaccagattctacttgactgattctagattgtttgccccctacctgttatttaaaagcacatatttcaacatattgaatttcctaagctacagttgatttcaattttctttagctcatttttaattctcttcatgcataatctttaaaaaaaaatccaatatgatgttttgtgctgtgccgtttgacagcttgaaaactggttatgccatgtcccaggcacttcttttttttttttttttttttgagacgtagtctcgctctgtcaccaggctgcagtgcagtggcacggtctcggctcactgcaacctctgactccctggttcaagcgattcttctgcctcagcctcccgagtagctgggactacgggcacccaccaccatgcccggctaatttttgtaattttagtagagacagagtttcaccatcttggccaggatggtctggatctcctgacctcgtgatccgcccacgtcggcctcccaaagtgctgggattacagacgtgagcctccgtacccggccccacacacttcttttgatgataggaatacatgggtgaacaaaacccatgcagtccctgttctcatggagcttagggtcgctgggggaggactgacattcaattagtaagtagcacaataaagactgaggagggatggtataggtttgcttatgcatagctaagtgtgttattcttcagtggttttccttcatctttgggataaaatctaagcttcatagcacgtacatatggctattctggaactgacgggagcctcttgatatacttacagatcctctccacgctcccgccccatgtctgcgcttcattggaatgccttggcctcttgcttcttgaacagacttcagtatgagccaaagcactattacttccttggagtctttcctgctttcttattcatgatatttctccttggtgcgcttgtggcctcactgtgtcccatcaccaaccccttcactgtgtaattttgtattgtctcctttaaatagattctgaggcccttgggcccagaaatgcggttttctgtcattttatccttagtgtctgtcttaacatctgataggtgctggaggagtctcatggttagtggtgcctacagacggatcattgttttgatggcggtaacagcacctgggttccacaagtgtttgaacgaatacacacacccctgctggatatccagtgaatgagatttcagctttgggcgagatgctggcctatgtggtgtttaaatgttttgaaagttatcactgctttttttctattacataattatttatttttaccaagctctcaaatgtcttaattgtgccagtcatatgttatgaattctatttctgggtattgtaggaacagcagttcctatggcttttttttttttttttctgtgtatgagcaattcgactcagtgggatgatattttcttttataactcattaatgtttgcgataccgtgtactcaaatattcaatgtcagctgtcagctaccattgggatccatcccacagaccatcaaaatgtacttttgggctgaattagtcctatgccaagacttgtgggtggatccagcagcagttgggaaccacgtgccaggcctggtgtatgtgctcacggacacattaatccgatcatacctttcttcccttaaagaaacaattaatgttaatgttattgtactttggctaatgcagagtctcaaagttaaattaagcacaacataggaaattctaagtggttacccgtaaaatggaagaccgtttcattcccgctgagtgcaaatctggtgtctccgtatactcaacatgaatggccgtaatacttaatgctttaaaaaatgcatctatttccaatgatagatgaaaagcatttatttgagccatccgcatgcagtgaacaatctgtaaaatatttggttatcttcagctgggcagcattcttccagctcgtattgagcttgactacgtctagatctcatgcaaggcatccgggccagccatgaaggaggatgaggtccctgctctcaaggagatcactgtctcgatacacagatgctcagagccctgcaggacccctctggctcttggtgtggactgtgcactgcatgctatttctcttgaaaactctagagaactgctcgctgtcctgtgggttaagtcacttagtgtaatcccgagggaataagcagacgccctcccgaaagcctggcatctgggactgtcaacattgattactacagggacccaatgagatggaattaaaattagcccatacagaaaaagagcacaggaactgtcagggagataggaacatttgtcctggaaatacctgggtttttgaataggtttcctgatgcaaaggtcagtgtttcatacacacgcgtacttctccccacaacacccccattttacacctttcagtacaactctgatttagagaagtgtggtggagatttatcttttttttttttttttggtgttgggtggcgaggagggagtggtgaggttgggaagggcagtccgtcatccccaagccttacttctgggggatttcccccttgtagagggctgggaacttacgttccagtacagaaagacaggaaaagacctaactacatcatatgccaggtggtactaagtactacaaagaaaaacaaagtaagggaggaaggagagagcataatggtgtgcaaatggatatatacatgttcatattttataaaacttgtcagacaggcctctctgaaaaagtgacatttagcagagacctatgggaaatgacctcaaaaatgacttccccatttcccatgggtctctgctaaatgtccaagttttagagagcaaaaagagaacgtgcaaaggccctgaggtagagagcatgttctgtgtctttaaggaaccgcaaggtgtcctccatggctgtagagaacaggtgagggacagtgtggtatagggttggatgcccagagaaattgcagtaggccaggaacagttcagagtttattctgaaggacggatctgacctgaccttgcaaaaggaccacattggctgctgagttgggacagtagtggccaggagaccaatggcggtggctttgagtaacatcgtactggtgtaggtggtgggaagtgctggggttccagctacattttgacagtagagctgacaagatctcctaaagaattgggtattgaatgtgtgagaaagaggagtcatggatgactccaaggtttttgggccaaggagctggcaaaatggagttgccgttttcagaagggaaagaccaagggggcaaacacatgaaaagaacattagcccctgaattttagatactttctttgctccatatgaaaggaacttgaaatttgaaaggatgcacatctctgattatataagtaaatattacagttgcctagttcttgagattacagttgatccgtgaacaacgcaggttggggtgcccaacctgtgcagtcagaaatccacgtataccttttgactccccaaaaacttaactactaatagcctactgttaatcagaagccttaccaataacatagtcaattaacatgttttgtatgttgtatgtattatatactgagattcctacagtaaagtaagctagagtcaaggaaaatgttattaagaaaatcataaggaagagagaatacatttacgatttgtttaatggaagtggatcatccgaaaggccttcctcctcatcgtcttcatgttgagtgggctgaggaggaggaggaggatgagtggctggtcatgctgtctctgggacggcagaggcagaagaaaatccacatgtaaatggatcctcacagttcaaatccatgtcgttcagaggccaaatgtatttgggtctgtgaaactggcctttgctttccatcgtgggcagagttagctgattataaaatcattcgttcagcagaacttggtggttggattccaaacctgcaaaggaactatcatgaggggcaagtttctgccagcgggtatatcccatcccagcaacactgttctgagcccctcagcaagattccatgtcctggtgcagggagtcactccttgtactcccaacaagctagccagagtactcctgccccgtcagcctccctccccaccttctcatcactgtttgctgtctctcctttgagcgcctccaggtctctaagtctttggtgtaagtggccctgccaactctctcttggtcattcaaagaacagtctgtgtaaacagcaccaagttgacaccatctggcccaattcccctgcattttcttggagagtgattgtcttgtgaagcattgagacaaagccttatttgaggagagtccttggtggggaaacaatagcttctgtgttcttcacaagaacctctttggagagcaaactaaacttgggtgggtggatattgaaaaggcttttccaagggtaggaagcaaaatgtaattatcttcctctgcaggagtttttctgttgacatttcctgctcttaacaaagtatagtgtgtgcccttaagtgtgttgttctggaagcatccacagccctttcagtgtatcttacatgctgtggataatttaaaaagtacccatttattttacaagttggagggagtgtaagacccactgaattcaatacatagcatccacatttttaaccagaaatctgaagtgttaatttgcttcccgtttgtccagtgaacttgactcttaacattttcttaaattaggggaatgggagctgtaagttacagtagatgccaagtacttggtaaaaatgaaatgttggtgggggaaagccatggggaaaatgtatttgtcaaaacactttaggctaaataacttaataataaatgtagtatctcatggccaggcagtgcaacattcaatacagtagtcacttgccacatgtggctatttaaatttaaattaaataaaattgaaaacacagttgcactagccatactcaagggctcattagccatctgtggccagtggctactgaattagcacagatatagaacattccctccctggtagaacattgtattgggcagtactgatggagaacatagtataggaaccatctatgataaattatcatacatgtcactcattgttgtccagcccaaagcctgagggtaggagatgctaagagacttgaagaaaatcttgttctacagtggcatgatcttggtggtgtaggatgggaagctcaagttttgtacccttcagttgaaacatttatcctgctggtaactctggtctaggacagtaacagtgtactgagctacacgatcctgtgtagataacgtgctttgttctaagacacttacatagaaaatataacctattttaataagaaaataatggagtcatttcaactcatggggtaaataaaatgtaggaaagaaagggggaagcagaggtggagtgaattttgaaagtcccccgtttgtgtcggtgggtatgtgatctgactttgaataaaagagaatcagatggacgaatcttttcttaactcaatggtggatgactgacattgccctattttccagttacatttaaatggaatcaattgttttctcttctagcataaagagcaggcaaaggatggttatcatgctttggctgagaccaggcatgctggataaatatttaccaagctaaggaggtctgtgagaacagggctgggtcagggatgcccaggagtaagtgacattgttctcatagcagagccatgttgtgctactgctgccagatgacccagcaggctcagagtcatacttcagaggaggggaacacaggtcacctgaggaaaggtagcgtgacttcaaacactgggccactaagaaaggtggaccccatctctgaggtaccaggctacatgctgtggttgacaccagaatccatggagaaacctctgggtgtcctgcaccccacagagaggtttggaagcaggctgcaaatggcacagggatactgtcaacaatatgtaaaatgtagtcagtcagtgtaaggaatcgaaatttccatgatcacaacttatcctgaatgtgtgtggaagtaaagccaggggctattgtactgacaaataggaataggagaaggtgacctccctgagcctagagaaaggcagggcagggatttatcgggttaacatgggccagtggagagggtgcggcctcctgcccactgggaagaaagggccaggcatcctgtctttaaactaagatggccattttgcttacccacatttttttgctcagctcactattgagtcaacaaatcttttgatcatggcagggttcccagatgtttttgggattgtaaggcaaatgtgaggatgcctcaagagatgctggtctacttgggctttactctttaccaagtaggtatatttatgtgtgtcgaagtccatctatgaatggtctgtggacttgagctatttccctggtatttgatcatctctaaccaagctgatcagtcatttttcattcctgaaaggaggaaaaagaacaaacagcattttggccccactgtggcttcccttactctcatttgacccttggccctccttctcactgaggcctgtggaaagcacagctccgtgaaatttaacattattcttgttatgatcaccagtgaagaaactcatttgcaaagccactaactcaaggagggcaggttatgggatgccatgaagggttcaaccattgataagataagggttcaaccatgaagggttcaaccattgataagaatgctcttatcaagcattcaacaaatattgataaatactgttataatatttatttgtaaactatatttgtatcatgtcatgcagtgaactaagagttctcccacatgtcatattacttaatttaaaataaaaacacacttgtgaggtgaggacagtgcttgcttattacttttcggcacaagtcattatagggaaagataaaatgaaatagacacacacctggcctttggcataaaggtaaatttacagtattattaatttggagagagcactttagagattggctttgtttgttgtatttcttctttctgttttggcaggagtgaaaagcattttattcttcaaaaaatatgtatgtccccaaggccaggcatggtggctcatgcctgtaatcccagccctttgggaggctgaggcaggcggatcacctgaggccaggagttcaagaccagcctggccaacatgatgaaaccccgtctctactaaaaatacaaaaattagctgggcgtggtggagggcacctgtaattccagctactggggaagctgaggcaggataatcgcttgatcccgagaggcagaggttgcagtgagctgagatcacaccattgcactccagcctgggcaacaagagcaaaactccgtctcagaaaaaaaaaattatatatatatatattacacacacacacacacacacacacacacacacacacacacacacacacacacacacacatatatccccaggcattatttatttatttattttttgcaagtctgtctacttacataaagggctatgttgttaatttaaatgaaagggattcatgtttagggcttcttgcctggtataccttggtgctcttttgaagtgatattaaattttagggcaggaatcgtaaattgatttttattccactgccaagtttagaggagtcatggcagcagagggagccctgggcaggcaatgccacgagactcgcgtgtcctcagtggatatggggaggatgaaggggcagtggacacaacccaggtttgctattcttgctccgtgggggaatgctagccatttagatttaaggaagctcgctgggttactacctctgcttataaactccagatttgtcaataagatgacctttgaaagcataaaaagcctgcagataaaaataacctcccagtccccctctcctcccccatgttcttctggctgggtgagtcagtttcttatgcatctttgacttgctgatcttgttccataaagcatcaccatcttaaagaatggttcaaataataaagagacatttggaattttcttcccagcctaaagacttactccagaaataaaggtcagttcagatttgttaacatctgcattaattaggacatctagcatgtcaagtaataaaagctaaaattctttctgcaacgataaagaattgtatctggaagactggggtatgtatgcatgtggtattctgagagtcctttcttcccatccttttatattttgcattcttaaaattaagaaattaaagagccataatcactgcagtttaaaatataagaaagagccctgaacttggatgaccttaggtggttgcttagcctctagcccagggcttgtccaggccaactgcacattagcctcacctggggagctttttaaaagaatactgattcccaggtgcgacaccagctaactgcatcagagctttggggatgagacccgagcatcgatacattattttaaagagcttccacatggagcatgtcctggtttgagagcagctactctagcagatctgtgtcttcagtttcctcatctataaactcccattatcaatcaactgggaagaccttcgtggattaggctcgtcaccttctccagcctcaccgccatcattccttcctgtcccgtggccccccgattgcaggtacaccttgccgccagcacatgcgcacactctcctttctgccttgaatgctatttccccagtttcttcccattccagttctctggatgaaatgactttccctgtaaaaatccgaatcagtgcttctccccttgtagaaacccccgttctcgccagagtggacatgggcatccttctcctatgtttccatgatctgtgaagacagggaccccccgctcttcatgcacatcctccactcctagcacaggagatgttcaggaagcctttgctaatgggagccttttttgcgtagaatgtctgttttcccttctgaagttctgagccacattagagtacttgtaaactgtaaaggattttacaaatataaagtgacttaatggccttttttttttttttttttcctgagacagaatctccctctgtctgccaggctagagtgcagtgacatagctcactgcagcctctgcttcccaactcaggtgatcctctcacctctgcctcttgagtagctgggaccacaggtgctagccaccatgcctggctaatttttgtattttttgtggggacaaagtgtcactacattgcccaggctggtttcaaactcctgagctcaagtgatcctcctaccttggcctcccaaagctgggattacacggccctaaatgactttttaaatgacactgatttaaatgatttcaaatgatggttttttaataacagcaaatgaatattcatatatcacctttctgtaatctctgcttttcttcaagtgagaatatggggcatagggctttctttattgtgcacagcacagtctggttgccctcaggggagatgccggattgttcccataggaagataggctgtagggtagccttagtgctgtcaactgcaaagtgacgttcagctgatcagcaggagctacttagatggtgtgtgccctgggcagcagctccataaaaccaaaaccttgtccaaataacggagctgcccatgaacttttattatgtggacttacctctctcgaagccatctgtgtgtgtggttttgtgaagcaattaagctccaggtgtgcaatagaaatgaagtagccgcttaattatttggtgaaacagcaggcatttgggattcaagattggctttaaaacttcccaggctttgttcatgctattttgttcttaggaattttaacacagcctagagagaaagggtgaattactatgactacagccaactgtaggtacgataattttaaaaactcaaactgccccgtgtttaaatgaaattataagaagatctgcctgattctctttgggttattactactgtgggaaggaggacatttgggtggggacgttatgtttatgaacgggctgacatgtaagcaaaatttgggtagatgtgtatgtttgggggaaggaagcccctctctctcatctgattctcaaaagggtcctgtctccctccaccgcttcacccccaccaataggaatggagtcttcagtgctgttttatgttactttgaagttgtcagttgtatctaagaattaaagatagattttgaataagttccttgtcatgttacatggcatagaagcagatccctatcagagcgggtttctgaattatccacgttccctgtatcttgtttgccatcatcctgtgcgtttgcattttgaccttgacatttctgatgagaaatggcagagaagtagaaaatgaaataaagcagaatgccgagaaacagggcgacccaggatttccatgtcaggctgtgtaggactgtgatgggaactgccccaagccccagagctgcgcagcacggtggccctgcgtgtgctctgcatatttgagcatctgtcctctatcaggcattatgtgtatactttcctttttagttcctttaacagcattttcaaggcttggttatcccattttgccaaggaaaagggaagacaccatggcttgtgtttaaatacattgccttgggatcacacatctctacgttcattcgtgtcgcataatctgaagactgattgacaaggtcccatgcttgcacagaggtggactcactaaacatttgttagctgtaacttactagcatagaagacagtttccaaaggtgcagatagaaactcttatgggactgcaccccatgcttctttttgttttatcatctgcttgtatgaaagagttggttgggatgaagcaatcagcttaatttttttccccttacctgtggctttcaagtattttgtgtttgctctgccagctgttcccaggaatggagtgaaacccttgttttgtttttgtctctgtgtttatgctgttgggctttcatatcttttcatcagcacttcattaattctttggttatgggacatgagcaatgtatagaggagttaaaaacagtccctggccttctaggagcttagagcattaaaaaggagctttctgtcttttcaacgccttggttgtgtaataatgtaggtgagttacacccgctgatggatgagtagtatgtttcttgctgtaaagtggaaatagaaaggaataaatggtgagcaggctttaggaatgtatttggtcatttactaacattgtatatatgaggattttcagacctgtgctgaatggaactgcaagttttaagtggaggggctgccaaaaatgaaggcacgtgctgctaagatgctatctggcgggagggatggaacaggaaagcggaggtttctttgggaatgcagtgagtggcccccttgggattatgtgcacaacttcagaaaatattgattatatttaaaaaatattgattttaatgctgggtaataaagcaatacatgttcctatcaaaaacatttgaaccgacagcaactaaaaaaagccacagttctaccatgcagaagtaaccattgttacaaaactttgctgtctgtttttttggcatagggtgttttattaatattgacctttgctagaaacaaccttttctcttcctctctatcctcacaccctctctcccaggcactgagaacaagatggttaccagccaagagacataaaagcatactctggctggctctatttgaaagatggggcccagcaggcgaaatgtatgaacacgtaggggctgtctactgaagtgagagctttgacattacgccttcaaattattcctttccttgcctattctacagaagactcataagccttgagcaattgtgtgtggagttatgctcctgggtggcaacataaatgctaaagtaggaaaaatattagtaaagatacagtctgggccccaaagaaccacattagagtcttaactccaattatagtcttggaaacctgaattcataatttccttccatccttctgcagccttaggaagatgtaattctttaatcactttatttgagagcttaggaaaataaacagtaacaaaaagctgttcagtggagctatatggctgcaacacacgactgcacggacaaaaatgtggtgctgaaatcactgctattttaataatcggtacatttaattctagctctttattattttaaaatagttttttgtttctatgtttttggatgctttctgcctcccagatgatctgctgcttcaagtatgtgtgctaatcagtagctaatcagggggactgaaatgctacaggagcattgaaagcttcctcttttgttctggcctcactattgaatagtttctaatgttcccccaaataatgtttaaagaatttattaaaacactccctctcagtcccagtaataggccaagagccaaccacacacagaatttggccacaccctttcccctgagagcactgtatctagattaagatatttattgaggcaaagagaaagttggtgttaggttaggaggtctggagtgagaagacagtccgtccatgctgccttatggggttggcctcgagtagtgtggggacgacaggctttcacgttagtcacttagaggtcactgggaactgttccttggggccctgggccactgtcgtttgcacggaccccgtgtctctctcagccttggtagcagtcatccaaccacatctctatcatcgttctaaccggcagtgaagagagctgggcagatgctttgggagccctcttggtttggtacccaggatgtccgcgtattctttttgagtggattgatttccagggaaaatgttacattatataacagcagttttataaacatatacaaaatgtgttctgtacatgtaaaagggtcttgccttctgactgtgccctcttgccggtggcttcatcagctcttccatctctgcaggtgaagccacttctctgctccgcccagcagggccacccttccccgtcccctctgtactttttttctaaaatatagaaagaacagcattatgaatattacttgctttaccaaatgatggtttcaaatatatatggggcacttaatgtccagttttctttgaaaatagacttctccaaaaatgttggcctggtcaggcactgaggcttctgtcttctgtgctgctgccgacttgggggctccatggccttggagagttaccctttaagggactccattaatgcatcccaaatgacaaagcccctgcctggatgatctctcaggtctctccaaccctggaattggtgatcctgttgttggtccagaccagctgtcatcaacttggggccattgcgccatccaggggacatcgagctgggtccagagactgctttggttgtcatctaatggcatcttgaggaaagaggccaaggcactgctgatcatcctacaaggcataggacagtccaccctgcccccaacaaaggaacacctgctcaaatgtcagtaatgcagagctcatgccagcccccacctggaggagccctgggcaagtacattgaccagctcctggccactttaatgcacttttttctttctctctgttggacttgtagggctttctctggtccacgtgtcactttccacgtctgtttaccatctgaaagttctgtaggtgaagaggtggagaagtcagacaggtctgcttggcagaaacagagcttctattgtatgaggttgctggcaagtgagagaagcctgaagtcaagccttctgcggaggtgtgggttttctgagccacattaaaaatgtgtggctcgttctcttctctctgttagaattttcctggcagtgacttaggagcttggcatttgtttacttttccattttgtttatgtctttctacattcctgggacttggattgttgaaagctcagcgttttctagataatactgtgcatttaatattttagaggggatagaacctaaagaagaggtgttttgatcgtataaacctttcgggcttttggggggaaatcaagtccccaaaatggtagtacattgaaaacacacagagggatacttaacttgccttaagaagccagtgtttttatgtttatttaagtgtacacgtactcggtggtgtatggctcagacttctttaaaaagcagaaagtaaagactgtcctctgagccaaagccagggcatggaggatgcgtgcaacagccttgttaattcgggtgaccggatttctcaaacaaaacagatcatcctgtctgtcgactttaaaattcatgatcattttttttttcccctaaggaaacctgattccttttaaggaatacttggtgtagacacacctcaaaattgaccccgtacacagactggctctgtacccattaacttccctgcatagaagtaggaagcaaaaaggaactttccatgaattgggctgacttagctgccacattttggcacaaaagcaggggccaccaagttagctgttaactctgctctttaatggaaagccataatcaaacctccagaataatggggcaaacacgtggaatgaactctctttccaccacttttgtaaaatctaccatgaatggcaagtgccagcttatgcctgtaatcttacccatatcaaaaaattcttttctagctcacattcattcctccattttccccagttgctatattttcaacctcccacactcatcttttttttcacccctgcccacaccagtggccaaagatggtcactttctttttccgagagctgcttctccctgtccggggcagatcagctttgccacacttcacccttcctgggcgtgctcaggcaaaaagcactgcagccctctctcctagcaccaacctagcctgggtgctagcactgaccaaggtctgggcatttgaggaatttttacctataacatcgttgtctggagagatcaaggaaaggcaaggtgaagagcaaagaggaacttcttcaggatcccattggggtgagaatggaagccattagttctcagttgtgggatgcatttctccttgctgagagattgaggtcgatgaggtagcatggttgatattgatcccttgggaccagagtaggggcaggagcagctcttatctgcagctgtgggtgctttgaaaccaggggcgaggagagttaaggtgagtgcaataagcccatttgggcaagagagagagcagggagtatcaggccccaacgaggagagctcctgagctgagggaggaggtagtgatgtggcagcctgtagaagtgtggaggtggccacttggtcctggtggagttttcatgaattttgcgggcccactctgtatgtagcaggctctgttttgattgtaaagggaatatcaatataatttaccttgattggttatgctcaacatgcacgaacctccagaaactttatgctgtgtgaataaagtcagatacacatgatgacgtgttgtttgaagccatttatgtgaaatgtccagaaaagtcaaatcttagaggcagaaagctgatgttgggtggttgtcttggcctgggagtgggaacagaaattgactgcagactggcttgagggaaagtttaagggtgatatggaaatgtttcagaactggattgtggtgatgtttgcacagtcctagaaatgtactaaaaagtcattgaactgtatacttacagtagttgaattttatagcatgtacatctacttcagtaaacctgttaacattttatttaaactggattttgttttgaggcttgtggcgagggttgagaacctacaaaaagatttatatgagggaacttggtcctcgttgtgtatgttctggggaacatgttcataaatgatgctgttaagagttggaacttgtaaattaagtcctctctgaacctacgcccttagctttagtaagcagatgttccagagtccccgttgtcgtcttctgaaatgctcaacatacaaatggcttcatggcttgtgtatataggacatagatttatgtatatgggaaaatctcactaactgggatattttactttagcctcaattagtaaaatcgatatgtgtaacaggagtggaattctatggaatctcagggttggaaagggctttaaaggttaagcgccagaggagggattctgcaaagaaaaacagacaattaagaaattcaaagactgcactgtatttgactagctgattgaaagacctgaaagttaatttatgcctctttgattagaaagttccattcatcagagttcactcgttacttgaccgaagtggtggtctgagtgtcactgcaagcctcctttttccctggtgtgtagaaaactctacctaacggtcctctctgtttactttgggaaatgcagcaattattagcgaggttgctgagagtcacttcaggcctggtaaaaacaaaccgtgagctcccttttcccctgtccccatgggtagattcatcttggtgtatgacatagtggggcccgagacccctccagcagaagggtctgctgctctgccagacctgcatatggaagccagtgaaattactgggtaatggagtgtaggacttccagctgcttaattgaaggctcttgtttttacccatatttactagggagtttatctttatgattttcattcatctaagaactaggtgggaagaaaaattattttaaaatggtttatagattatcaagggcttttgaagtgacttgtgcttctgtttcattcatttattcagtcagcagacatgtactccttggggtgttaggtccagaaaggtgcagattccgaggtgggtcctgctttgagataactctaggctggtggagaagagggctgcagagcggtacaggcctggagcctggagacacaggaaccaggaaagctacccattcgatgggcacagccaaggcggtgacacgagtttcttgcaggcgggcaggtgccatgattttaagtggtatcaccttcgcagaccaaactgatgaactgagaaattgtatgcgatgctgatgtttctgtctgaagccaaaagacatttatttctcacagctcatgcctccctgtctctcttcaactactaaaaagttgagaccttgtctgagctgggcataaattcatgcatagaaaattaacgtattatctgtcagccattggaacatgctgttcatatctttccatttaaccttaaagaatataacaaagcatgtgccacaaagaaatacacttgaattctgcttccgaatctttcagcctcatctgtctgtggtctgtattctttgtgttgagtagagaagtattaggcatggccataatgcttttagcaagagagagagagagaggagtgaaggttcactgtaatttgtggttgaaagatgataggggctcagtaagaatatttaaatgtgtatatatatatatattttttaatttatttattttttatttttattatttatttatttattttccttggggaaaatcctttcctcattcactaacaacaacttgtatttgtcagagaggatgtgatcctagtactggctgccatttgggtactcatgcatttagatcagtttccaacattttatccctcgcactttcaatgccatgacgtatctctgagaatttctttcttttttttttttgagacggagtttcgctcttgttgccaaggctggagtgcaaagacgtgatctcagctcaccgcagcctccatctccacctcctgggttcaagcgattctcctgcctcagcctcccgaatagctgggattacaggcacccgccaccacgcccagctaacttttgtatttttagtagagacggggtttctccatgttggtcaggctggtgttgaactcctgacttctggtaatccgcccatctcggcctcccaaagtgttggaattacaggcgtgagccaccacgcgggccctgagaatttccttaatgtgaaaagcttcacttctttaaggacgccttcatcatttgcatcacaacctctttcctcatttctgtcaataatccaccttcactaagcttctctggctgcacatctagagtctctcaaagggccagtgttgacgttcccctggtccactgtttcttctaaaactccacttaagttcaactcaaattttacttcttgtattattactttcccttttttttttcttgcactttcatcttcattggccagtttcccttttcagttacccatttttgtaaaatgtgattctgggcgaatcactgggagacaaggaggcaacacaactccacgctttgctgtctgtgtggagactgaactatccatgtgcagagacccatcttcagtagactatgaaagaagtgatggggttggtcactgatcatgcataacgtgcatctgtatttcatggagtgatgtgtagactggacagctgattgcaacgtttgcgctttatgcagttacttacagttaactatgttctaataactgaagtttgcattgtgttgttgggagactggtgtgatttaactaaaccagagtaactgaaactggtgcatatcaaccatgccaagcttaaacatatgggaaaaggagaaattgcctgacccactctagtaccttttcttacgaggggaagaggtgggaggggactagcagtgactcagcttctgttgcatgcccctgtgctagacactttacatgttccattttgtaggaaagaaaacagtcgaagagttttagtcacttgcttgaatacagttacaaacgacaagacttagaattcaggcccaggccttccagctccaaaatcttttttatctttttctttctttcttttttgttttgagaaaggatctcactctgttgcccaggctggagtgcagtcgtgcaattgtggcccgctgcagcctcgaactcctgggcttgatcagtccttctgcctcagcctcctgagtagctgggactacaggtacatgccaccacacccggctaacttttttttttatttcattttttgtcgagatgaggtctctctatgttacccaggctagcctcgaactcctggcctcaagcaatcctcctatgttggcctcccaaagtactgggattacaggtgtgagccaccgtgcccggcctctagctccaaaatctgtgctctttataccataccactcttggaaaagaaacaaaatattgtgttaggaaaagagaaaggagttaacattcattaaatattgggcttgggccatgtcattcttattcttcatgaccaccctcccagaaacctattattgtccccattacaaacgaagaaacagagcagagctgagaagctcaacagctaacctcgtcacagctggctaattgtggagggctcaatgtacaaatgacaggacagagatgagaggtccctcttgactcgcatgctgtttcttaggctttagtcttgagtttcattctggctttatgattccgcagattagaaagccggagaaagcaaaggatgagaggtttacctatgaagttgattgaatgcgtttttctcagaaggcagtttgggttgatatgaagtcattgatttttgaattaggttgagaattttttgaaatgtattggaggttgaattctaatacctcacacagattctgttatggatggagttgacagaactaatacctaatgaaaagtggctcctcctgaaacgcgtcccttgccccggtttcccccaccaccccagccttccttgacctctgacttgcccatctctgtctcgtgggctgtgagctggtatctcctgcccagccttgtgggtgtcccgaggtggtgtcgtgagtcctgttcacacgctacaggcctcgagtctttgagatttccaccgcaggctcacagcgcgttcatgtcggtgcctcttcatcagctccctccttctcccgaggccacaccaagtctcaagtccccttgtatttcctgctaaataaatattttcacatctgtttcctcctgtttatctctgactctgctgctttgtttagatctttgcaattactaactggaaataatgaagcctctccggtcccttacgtttctgtctttctccctccaatattatcttactctctgccagagtttctaaagcccaaatttgataatgttactcttttggaaaaaaaactatcagtgacttttcattgcttgctggataaagttcttagtacttagcaaggcacgcaagatcgtttacaatctgacggcagcctagcttcctgccttatgttccttagcccttgaacaggctgcccctggcctggactgcctgcccccctccgcccgcccccactctctctcttttttttttttttttttttttttttttttttgctaaatgcagctccaagggtttcttggactgtgaaacccacggaatttatcctagccttttttcctcctgtggctccacagcacatgcattccttgaatatagcacgtatcacatttgactttgtttacgtggtttttcccaaaggattgtgttgagaccttgaggatgataactgtcctatctgtgttaatcaggtagtaggtgttcagcaaatattcagtgaatcgatttcaaggtcaccgctcttctcgtgctccctcaggggcacgtggggcctgagtgccagggttatgaagggcgttctttgtaggtcccgtagctgagactgacaaacgtggtacccccttaggtggtgcagcgaatgcatcacctgaggaaggggaatggacgaagatagaagatgaggtcagaggctggagccgctgtccaggacagcctgacgagccacatgcactggacggcacctgagacatggctcctccagactagagtgtgctggatttgcctgagacacactcaatttcaaagacttaacaacaacaacaaagaatgtaagataactcagtgttttatcttgaagttttaatatgtgtaattttattttttgtttgtttgttttgagatggggtctcactctgctggccaggctggagtgcagaggcgcagtcttggctcactgcaacctctgcctcctgggttcaagtgatcctcccgctgcagcctcccgagtagctggtaccacaggcatgccaccaccatgcctggctgattttttgtatttttggggtttcacaaaaacggggtttcaccacgttgcccaggctggtcttgaactcctgggctcaagtgatttgcccacctcagccccccaccaaagtgctgggattacaggcgtgagccactatgcccggccaataggtataattttatattataaaatattagacataataatttaaagtgatctttataaattcacatgatcttgttggcaattttgaaatggatcattttaatatgttaaagtgataatattttggacctattagattacataaaatatattaatattaattttaagaggccttttttttttttttttttttttttttttttggagacggagtctcgctctgtggcccaggcgggagtgcagtggcgcaatctcggctcactgcaagctccgcctcccgggttcacgccattctcctgcctcagcctcccgagtagctgggcctacaggcgcccaccatcacgcccggctattttttttttgtatttttagtagagacggggtttcaccgtgttagccaggatggtctcgatctcctgacctcgtgatccgcccgcctcggcctcccaaagtgctgggattacaagcgtgagccaccgcgcccggccaagaggcctttttttaaactttttaaaatatggctactagaaacttttaacttatatttgtagctcatattctatttctcctggacagagatgggatagagagaagctgtaggaagcagaagaggctggtgcgagatgggagacttccatgcttaaaaaatgcttaaaaaagaataaaaagtggaacgaaaggagggaggagttgccatatttggcagaacaaggaaggcagaaactgccaaaaacagcaaacgccgtcaaggcactgttgaggggttaggtgatgcggaactgtgcctgtgtaggcaacagccccttaccccaaacggacaaactcgaaacggtgggtgaacgcttgcattgttttcccttgtgacaaagccattcccgtgcactttaacacaatgggagatacagcaaaaaggggaaaatatattccgcatctgtaatcctggtcttcagaagtaatccccatacacttgggatactgtcctctctccgacctcttcctctgtctgtgtgcgttgatgtctggtttttacgccgatgggaccatcctctctctctctattcctccaatctgctcttttgttccacttaatagattacatgttttttttttttcccataataggcttaagtgtaagataatctcgatggccttcagggaaataaagacacagaatgacgatgacttccacagtgcagcttgcttgcctccccttcccgacggcagctttgacagtcctagaccggatcccatcactccagagaggcaggtcgcctctgtgcctccccaggaatggttcctttggtggagtttcctaaataccatggctaaacccctccctcctctgaagggttatagccacagcctgaaataaatctgtacatcagtaattaggcatcacaaagatgacacagacatcctcatcatccacacagctgtgcttatgcccaggtgcatctgccttcatgtggcccagagcacattagattgaagaatttgaaactaggaatttaaatattccaatcttagtgaaattttcaaaaatggctattttgctaatttataaagtctgaaatgtggaggtttcgagttgacatttggagatggggtagatatcagttacaagtgtgaacacttggtagattttagaggatgggatgaaactcgtgggctgtccagttgaaggtgttgtgtgactggtggtggtgggtggtggtgggtggtgtgggccaggatgttgatttgtttcaaagagtaactttatcccctaagaaagacagtatttttgagtacactcaaattgtttattgagatttgattttatttgtcttaagtttcctgttggagatgaatctcaatatatccttcctcctgcccccttgcagagagaagctctttggaaatgcagggtcagagtccccttccccattacctaagaaggagaggtcaaagggcatagcaatagcattcccagaaattgttagggttcatggagcaggaaacaggctctatctgtgggaagtttgtgaaaggcaagggaggtagtaaggaaattcagtggaaaactgggttaaggacctgttgcttcttagtaatcattaacttcttagttacagcagaaacaatcacacttacaaattaacagcagcaccactcttgattgaactttcactgtggccctggtggcctaatgtatctattgtgatatttttcatgtttactgcaaacctgcaagcttcaggaagttatcctcattttgcacatgggaaactgaagcccaaaatgatcagtactatgtcaaagtcccatggctaaggaatgactgagtgggatttaatcccaggttttttttgtttgtttgtttcctctcccaaaggaaagcagttgccaaagtactagcaggtctgtgtgtgactccctctcccacctccagccctggtttgcttcctgttagggcaatgaattttggccttttaaatattttagtatcttttaatttcatgacatactctcttcatcctttcctgccagttgagagcaaggaaaatcggcagatagcaaatcagggtgctgtgtgtgtgtgtgcatgtgcgtgtgtgtgtgtgcacacacgtgcacacgttgggaaagtggtggcttttcaatgcaatcccagccgtattctggttggtggccctttcttacactttaaaaatcttatccttctggagaaactttaaataaagtaagagcctttgaaattctcctagagagaactcgtactttcaaaaataaactttgatgagcaggaatggctaccgtaatgatgggtttgcctgcctgcaatgtaactgctgttcttttatttcgttttgtttttttttgttgttttttgtttttttttgagacggagtctcgctctgtcacccaggctggagtatagtggcacgatcttggctcactacaacctccgcctcccaggttcaagcagttctcctgcctcagcctctggagtagctgggattataggcacctaccaccatgcttggctaatttttgtatttttttaggtagagacagggtttcaccatgttggccaggctggtcttgaactccttacctaaggcgatctgcctgcattgacctcccaaagtgctgggattgcaggtggtaactgctttttttttttttttttttctttgagacggagtctcgctctgtcgcccaggctggagtggagtggcgtgatcttggctcactgcaagctccacctcccgggttcatgccattctcctgcctcagcctccctagtagctgggactacaggcgcccgctaccacgcctggctaatttttgtatttttagtagagacagggtttcaccgtgttagccaggatggtctcaatctcctgaccttgtgatctgcctgcctcggcctcccaaaatgctgggattacaggcgtgagacactgcgcccagccagtaaatgctatttttaaggtggtcatagctcagtttgcaaggtgcatgtttgtgcttcaaactgtaagtattcaagatagagaaaagatggatttattctagcatttcagttttaattttgatgatacaagaaattcataatgcttccccccccaccggaaaagaggtcagtatagctcagtggaataattagtacacccagctggggcagagctgttttttaaaactaggaggctttagaagatggggacattatttataagaaaaaatttgaagcatctcttacatcagtttataagcctctcctgcataagaaccatcacaacagagccgcggcgttttcttgagtcactatagaggccgtgtgcacagggcgctctgccttctccctcagctgggctcactggcttacccgaggtctttacagtgcggcttctgactttatcacagacataatttggctaaagagggcaggaggagaagtgggccagggttttctttcatgggctactccagaagtcaagctgttttaggttgaactgtgctccctccaaaatatgttgaagtcctaagccctgtgaatgtgacttaatttggaagcagagtccttacagatgtaatgaagatgtaagttaaagtgaagtcactctggaatcgggtgggtcataatacacacacacacacacacacacacacacacactcactcgaatcgggtgggtcataatacacacatacactctggaatcgggtgggtcataatacacacacacacatacactctggaatcgggtgggtcataatacacacacacacacacacacacacacacacactctggaatcgggtgggtcataatcctccccttcccccaaacacacacacacacacacacacacacctgcacaaacgtgcaggcccagggagaaggccgtgtgatgatgggggcagagactgcagtgctggagccacaaacccaggagcgggatgccagggcttgccagcgccaccaggagaggcatggagcagattctcccagaaccttcaggaggaaccggccctgctaatgccttgaccttggacttactggcctcctgaactgtgagagaataaacttctgttcctttaagccacccatgaatggacctttgtccctaagaaactgatactcaagccagctacctaaggctgctgttggacttactctctatgatagctaaggctcccctcgcagccccagctgaaagatttttgctttggtctgctagcctttttagcatgagtctatcgtcattcctttagagaaaaaaaatgcggaagaagtaacatggcacaacactgggaagggatcatagggaaggacctgccagccgcctcctcatctcggcccgctctttgctcacctcctcgccccacaagagcgcctgtgatagcccacttttaggaaagactagacttcgagaaaaacccaccaccttgcaagtcatcatcatctaaacaaagactgggtttaggatgagggtcccatcctcacggctcactcaccgtttggcaggttgccaaggctgcccaagctacaggtccctcttgtgtaacacggattgagctgggtccaagctcaggcatgtagggagaagaacgtgtgtgcggatgggtacaggtgcaggcagggaggcttggggttgaacactagatcttacgtcagtgtttgacatggagccagtgttataagtcacattcttcttggtgagaaagtgaaagtagcaaacattttcctgagatcctactatatacctggcattctgctggttagcaacatttattatattttatgtcttttttttttttttttttttttttgagatggagtcttgctttgtcgccaggctggagtgcactggcgcaatctcggctcactgcaacctccgtctcccgggttcaagcgattctcctgcctcagcctcccgagtagctgggactacaggcgtgtgccaccatgcccagctaatttttgtatttttagtagagacagggtttcaccatgttggccaggatggtctcgatctcttgacctcatgatctgcccgcctcggcctcccaaagtgctgggattacaggcatgagccaccgtgcccagcctatgtcatcttgttattcattttataatttcaagacggctcaaaaaagaaagaggtggggaaatgtttgtggtggaatcctgggtagtttgacatgacagcagaatttgcttaaagcaaattaaatgaaatcagccaggccctgcaaattgctgtctcctttttgaggcaattagaccccacgaataacccagctcttgtggtcctgcgggacgcatttcccagagcacctctagggaaataggatgagccaattaaggaagagaggggcagaccgattgtccttattgtatgtatgtattgttgggaggagctttgtgtttgcttgggactcggattgaagatagcagatggttcaaagacttggagtggagaaggttggaaaaacaccaggaccctgtgtgggcgagagagaagctaaaacacccagagctgggaggccaagtcatggatggccaacaggacagcgctcccagggctccttaaatggctctttgggccttctcagatggttacacaataacaatcgactgtgagttaaagatgaaattttgttcatttgtttgttttttaaaacagggtcttgccctgtcactcagggtggagtgctgtggtgtgattctggctcactgcagccacagtacacctcagcctcctgagtagctgggaccacaggcacataccaccatgcccagctgtttaacgtttttgctgagacagagatctcactatattgcccaagctgtctcgaactcctgggctcaagcaatgccccgcctctgcctcccaaagtgctgggattacaggtatgagcacccctcccagacaaggatgaagtgttttatgcgaagatggtccattaaaccagctgatgtgttatgatcaagcacttatctaaattttcctgaactttacaactcaagttacttgtgcccgtttgtctccactcctaaaggagtttcaggagatagatgtgagaacaggtggcctttcatgaaagtgccatgtgcagtaggaaaaaccaggctgtgtctgggaaggctgaggagtgcagcagtgggtggagacggccgtgcttaggagctcacatctgctcgctcttccttccttcgcctcgtggtgtcctggaaaacaaaagatgcagaggagactgtgaatgcttgagtcactgcagtgaggagacttcagaattcactggtggttttctgagtcccagcccagcagtaagagcagtcgggcagtaagaaatttcttgccaatttcgcttccaaaggtgagttacaattgtgatcctcaaataaaatagctcctagaacttcacatttttcagcgtcttattgtcattgataatcttcagtggtttcagatgttcaggcctctccctcctatggacagtatcaccagtgccttccaacagtgacactgaagtgcggcttatgtcatggacccggggaatgcggaggaatctgtcacatgagacggtttcggctggagtatgtcaaccctcatggttgctgttgaatttgtttgtgaacatttgactgcaggctgctctcattcagtgtgtgtcaacccttgtctcaggaaggtgctgagctatttttaacagtagagtgaagagctaccgccttggctcgaaccagctgtcccctactctcagatgtggactccctaaaaaagtcataacaccattaacaagcaaaacccctagccaacagggggttcctgttggcagtcaggcactgctggaagttgtttccttgtgaaaaactatttaatctccatgagaatcctgctaggtagttcttggatcatcccaaattttgtagatgtggaaacaaaggcatagagaggttaaagaacttgttccaggtcacacagcccatgcgtggcagatcctctgcagctcctggtgcaccctgcagacacaggacccggagccccctccccatccaggtgaggcccattgccctggagagctcagcctccagcagccatgcctttggggtcccacctctttcgccttgggggtctcccaagtcatcttcatccttgcgttgtaacacagctaaagtttttatttgtaactagtggatgccagaacactgcgttgcaagcatgtgtatagctttacccagtgattccgtcatggggagattttgccgaaatgagtcttgtccccttcagttggtttgagcagccaccgctgtgatggaaccagagataacaccaggcctgacatttgagggtgtgtgtaggtaggttctttgtgaagaattaactcccgctcagaagcaaccagttggaaagcaaataggggtgcttttcacatcccactttggttacacgttctcagtaggttaggaaagtttaggaaggaacacctgtgaggctgattctgaaatcacccccagaattacagtttttgcaagtgtagggcttccttttggagaacaagcagctccatgctcagcacacagacacacacagccatgtggagtgcagggcgacttctctctgcttccagctgccactccctatttctagcgttgctgccaagaagatgggttattagtttggccaaagctaatcctaaaggaaattgcaggtaccagagagagagaagggagagcaagagagatttcaaacatgaaatctcatttttaaaaattgcatgtgtggttttgtttgtttgattttagagctggggtcttgcgctgtcacccaggctggggtgcagtggtacgatcatagcttactgcagccatgaactcctgggctcaagggatccgcctgcctcagcttcctgagtagctggcacagccacttgcccacacaactagcaaatgaaaccccattttgggtggtctccttccttgttttgaaccggaggcattgactccataagtatatttgaaaatggaaatttgtcctgacgacaaaatccccttccttatagtccaagaccctttccagctgaaaaggtgattggttgctatccacttgttatccaaagaaggtaaagatggggtttgagtttttaattgattcccctctgtcttttgctgtaagtggctccataccacttaggtggggctgtcataaccacacgtcactgactggatggcttaaacaacagaattgtatttgctcacagttctggaggctggaagtccaagatcaaggtgttggccaattccagtcctggtgagggctctcttcctggtttgcagagggccgcctccttgtagtgtcctttcatggcagagagagagcaagcaaactctggtgtctcctcctcctttctttctctctctctctccctccctcctttccttccttcctctctccttcctttccttctttccttcctctctcctgcgtttccttccttccttcctctctccttcctcttcctcatcctcctcctccctcttcatctccttcttcctcctcctccctcttcatctccttccttccttctcctcctccttttttttttttttttttttgaaacagggtcttgctttgttacccaggctgggtgcagtggcacaatcatggctcacaacagcctcaagctcagctcccacctgagcttcccaggtagctgtgactacaggcatgcaccaccacacctggctaatttttgtatttttttttgtggagatatggtctccctgtgttgttcaggctggtctcaaactcctgagcttgcaacctgcacacattggccttccaaaacactgggatttcaggcatgagccaccactcccgactatctcttcttctaagaacgtgaatcctattggatcagggcggcatcgttacgacctcatttaaccttaattgctgtatttccttactttaaccgtggccacacacagggttaggacttcgacctgtaaatttggatggggcacagtttagtccatagcagtgtcaaagctgccatctcacttaatcagggaagatgtgaccaaggatgagagccacaggctgccctgaggcaccctggcatctccctggtagaagtggccattgctttccagggctgccgcactttctccatttgaccttgcatggcgccaggttgggagggagagctggttgcccagactgccaccaccccacccagcagtctgccttctctttgatgtcttttgctgtctgccctgtctctctggagctcctggcccctccctcctgttgtaggcagtaggcaatggggctgccctcacttgtctgtgtgcctggtggcgtttgtatctttctggaaagtatgcgtgtttcatttatgcatctgtgtgaaatacaagacatatatgtcttcatatgtacctgttgcttcctttggagcttagttttttcttgtttttttttttttttttttgtttgtttgttttgacaggatctcattctgttgcccaggctagagtgcagtggcaggatctcagctcactgcagcctcggccccctgggctaaagcagtcctcccgcctcagcctcccaagtagctgggaccacaagtgtgcaccaccagccccgtccagtttttgtttattttttgtagagatggggtgttgctatgttgcccaggctgctctcaaactcctaggctcaagcagtcgaccacctgggactctcaaaatgttgggattacaggtatgagccactatacctggcctgaaactttgtttttaaatagtaaaatacttggaagggaataatataatttattatagaaaataatcagttcgtcagccaggtgcagtggctcacgcctgtaatcccagcactttgggaggctgaggcaggcggatcacaaggtcaggagatcgagaccatcctcgctaacatggtgaaaccccgtctctattaaaaatacaaaaaattagccaggcgtggtagcaggcacctgtagtcccagctactctggcggctgaggcaggagaatggtgtgaacccgggaggcggaggttgcagtgagctgagattgcgccactgcactccagcctgggcaacagagcaagactctgtctcagaaaagaatgagttcacagcctccatttatctctcttcttccccttcataaatgtatatgaaatataaacccacagtagagcatgtggattcttattttgtcaggatcaaattgtttttattttcctcaaataacttggtataatctgccattctagtagatttatagcaaaaccaagtccagtctttatctttgaaatctggatacctacagttgctgggggaaaaaaacaacagacttttttttttcttgaaaataagttggaaaaaaagttaaaagtgtgtttctgaattaggtattacttcttcggttataaatgaagaacaaccttgaggtaacttaagcagaaaaaggaaattgatcctcacattatgggggtgtctgaaacacccggggtggaatgtagctgaggatggtgaggttacgtgagccaggcctgtgtggtcagacaccctgtctgttttcctcccgggctagctcttcggtgcctgccgtcttcccttcatctgcagacctgcatgcttagtgtctccaggcctcttggaagatgcccattctcatacgtgggcctggagtcaaggctcacaaggagagagaaaattattttatcagttgtagttccaggttcctgaaaaggtacctgatcggcccaggtgtgctcaggactccctctgtccctgccccctactctccgtacaatctggatgtgcgtgtcttgctgccaggtattcgtactattatagttttacccagtttgcccgtcaccacttgggaataacacctgtgcctgtcctcacctatgtgaagctgtagtttcaaaatcatctttggatgactagaatgaactagaaccaagaacaggtactcacttctcctttaacctctttatccctagcagcagataacataacacctcatggagatactaaggtggtttcttaagtcagataagaatgaacagatttaacttgcttttttggtatccatggacaccttagactgttagaaaactctcaggatttgttggaatttaaattgtaaacaaaactgttttaaagcatttattctgaacacctccaacaatggtatcttcaacagtgatcttcaaactggataccattcttatcttcttttccaaaaagcctcccaaaggttgggccctgtgggttgatatgagctgccagacgagatccggtttagatagacacagttagacaattgctgttgttggcatgttcaggattagagccctatctcctccgagtcactcagaaggcccggaaatctaaatgtaaaactggagctgttgttcactccccgagagacacctccagtttgagaaggtgcaggtgaccctcgcaggtgcctttcaatgtctgtgactcacgaactgggagtctttgggttatggaagaagaacgtgatggtaacttgtcatcaccacctttgacgttgtttgaagctatgatgtgtgagtgtccccatggctgttggtcttattcagccattggattcagacaaaccctccaggactcttggtctttccagaagagctgagctgtcaccactgaccttgtggaatggaggatcccactctctcttttcgcttgtatcccctgtgaccgaaactgaggatcccatttgtttctgtggagtcgtggagaaactcagccggatcatctcatggccaatgagttaacttgttgaaagtcttgagtccaggcttgactaaagcacacttgagttacatatcaaagcgtgaagttaaacccacgcttagacaaatggttgtgtctgaaaaaggttctaagaattgaaaacagcttcagggaaaggacaaaaatcaccatctgattatccagggttgtggtatgtcatgctctttaagtgacagatagactgctagatttatggccaaagtagcaataccagaagacattccagggggatgatgacctgatgccattgcagaaaagaaacactttaatatggaggcagagacagaaggctctgtgacaaattacctgtgcgtgctaaacgggtgcttcttctgtgaaatcagttaagggaagcctcttggcctcatatgacttttgtattttagctacttagtcattaaaagaaaaccatagctctttgagcattgttatttggaaattttatggaatagaaaaatgtttgataatattaatcatctgagagaatttgatgtcaccaccttccagcctgggctttggatttgagcaaacttgagttgaaatcttagatctgccacgtaatagctggggcagttatcaaccttccctgctcttcagtttcttcctccagtacttcctggtggggtttctgtgagggttaaaatgggtattgtttgattgaaaagtacctagcacagggccaggagcggtggctcacgcctttagtcccagcactctggaaggccgaggctggcggatcacctgaggtcaggaattcgagaccagcctggccaatgtggtgaaaccctgtctctactaaaaatataaaaatgagtgggtcatggtggcaggtgcctgtaatcccagctactccggaggctgagacaggagaatcacttgaacctgggaggcagaggttgcagtgagtggagattgcaccattgcactctagcttgggtgacaagagtgaaactccgtctcaaaaacaaacaaacaaaaaaatgtgcctggcataggacttaggagagagtcagcaccacctgaaaggcactccaggaaaaatactggcaatgtgaaggattgttagtgacatgatgccacttccagggtgaacaccagcctagctccagcccaaatccacatgcttctgggagcactgggatttggactgcagttcatcttgcttgcaagagccaccatgctgcaccatcatccctctcacttgtcagtgctccttagccgtcagtgctccttagccgagtacagttctgactgccatgcgaccaagacccggagcttacatgctccttattggaaacagaaggaaaactcttgtgtgataggaagaaggcactgagtagaggctgttccccgggaattatccaagaatcacagctcagccgaggactttctggtactgtgcatttcagattttaaatttcacggttataataaccatcttgcacaaaggcagccgaaacccaaccaactgaaaacacgggcacacacataccgtatataccacgcatacatgcatgtcagccacacacagatgatttgcctagaaatttgtttctccagaccttttggcagaatagctatttgtcatgggagagggaggaaaatatttgcattcgtaataggaagagtttatggttgtgaataagctcatgtttgaaaaaacagtaatattagatatatggttgctggcactacacaattgcaggatgtaatagtggctactaacattaaacattacttaaaattacatgcattatagaaatggggatatttatctcatgtttaatgatccgtggtgaaaggatttgttgcttacaatccttaaaatgatcaatatattattttaacacttttaaaagggagttggttttttggttgtgagttaggagcagttgtcatgcacatattttataataaaattttagatttgttgccacagtttcattaatatatttaagcaggtgtgcccaggtagtggaatcagaaaggcaactcgattttatttaaaatatggttcaagtggtctctgtaatgagaaattcacatggcttttttttttttttctaatgagtttcctgctggcttcggagatgtggttgtttacagtagaagtattttttttttccatttgaggcttccattattattataagatcaataataaatacactgaatttatgtctgttaaatatttttagcctgctcctaacacatgaaaatattacatacctgttttgatctatttgtattctgttccttccaagtttttctattttaaaggaaaattcttgaaggccaccttttaaggtttctctaattggcacatctctggtcattaactttttacttttaaaggagagcagaaagacagattgtaaaaacaaaaagtagatatctagtttattttgctacttgataagaaaaaaatctccaattcttgcatactatttgcagttaactttattcagcctttagaggaaaatgtctcttcctttccagaattcaagccccataattttgtcttcctgttgagtgtcaacaatttttttaaagcctatatgaggaagctaacttccgagcaattaagtactcaagaaccagaattgaatttagtcatttttatatttataactaatacacattttgagtttcatcacaacttgaactatgtctgaggagttgcacatgaaggattttattacttgattaatatattaaatgcactaggaaaatttcctcgtaaagtttcattaaagagttaagatagtcctttatttcatgcgtacattgaagttatgtataatggtggctgtgaaatgttttctaaatttcaggtggctcttgattttctttgtgttttcatttgtggcttggaaagaaaaacaaaggtcaagttactctcatcctttatcacccagtgtttcatgaaggaagcctcattttcatgaggaaatcttggcgtgtctactccagcttgtgtattttggcagtatggaaaagcgaaacacggttcctgctgcgcccactgctttttgtgtaagatctattttgtattgggtaaccttggcattcagtgttttcacatttaattcgtaactgtctgcaagttgttatgaagctgaaattgatgatccatcagttcagtctaaagagcgtgttggaatcatgatttgatattttctggaaagagtttactttttgaaaggatgcccttagctctttttctaatgtcttcagaagaaaaaaaatggtttactattttcagaaaaaaaaggcgatgtactcactggtctattttctgtgatcaaaatgtgttgaccacctacccctggtgtgtgtttctgagcgtccttggcagcctctgccttcacaaccattctcttttcaaattcctctccttttccctttcccgtttgtgctagtaaagactcttggaagcatcaggccctgatgagctgaagcccccattccaggggtctttggctgctgcatttctgacttgagccacacagcgaagaccttctgacctatggcttctgacctattggccttcatggcccatggctgccttccgaactattatttatggtgggcattgagggattctgtttgttggccatgccttaatgctctgttttttgaggccttaacacagtagttgaaatttcttggccaaattggatagagaatgtgaaatagatactgtagaagcacttcagaacactctgtcatgaactatgggataataatgaagacttcccagactgactggtaagtagtccgtaaggaagacttgtggaaataaaccctgaaaaatatggtttatgcatttgatgttggaatagaagaaattattttgtttctatgtttcaacagcctatctttccatgagtattgaaaacagtgcttctattttttacattattggattcatctttacactcaagtgattactaacttggttaataaaactgttgtgttttccttttctttttttgtctttgtcacggctctctatctcatatgttctgtttctggtactctatcatctgtacgacactgctgaaagtgaaggctcccacctgacgccccagcttgctgattaaatttaggttaggctgatgatttaaggagtaaaccatctcaccagcactgttccagttcttcactggtgaaccaatggtaatgtctgggttgagagttacaaactgaaatccaggagaaatgctgatcttccctgtcttgctaatctaccttgtactggaacccagaatcaggttcctaaattctagattacacagccgtgacagaaggcattgagaaatcagagaggcacatacttctccaacacatactcaggtttcctcaagaatatttgtcataatatttgtagcttgtccagtttgatctgcatggagttgtcataagaaagtctttgtggctgaggatttggtaaaatgcagcatgctggtgagagttatatctcttgtttaaaacaaaacaaaacctgaaacaaccagggcctgaaagccgcactgtgttcccaagactccgcaacagccacagggcattttagcagagaaaacaaagcttgttttatagcttctcttcataggtctccctgacaggcttagagggacattgagtgaaaatggagctgttaatgatataataaatgcttctgaaatttttctattgggcaatccctcaatagctgactgctttgaaaaatgaatgaaaatcaaacataaagacacaaatggcttcgtctgcttggtaatgaataaacatatgcaaaaggacaatcagttgcaggtgtgttgcctgtctatagtgttttgtttctgcttttgtgtttgtcttccaagcaattaataaaccagcctggcctataatatcgttctggaaacattctttttcacaggctcagacttggagatttagccttaatgctttcttttcttgttttagttaaaaaaacccacctacataaaatttaccaccttcatcgtttttaagcatacagttcagtagcttttcgtattttcacattgctgtgaaacagaggtccagaactttttcatcctgcaatctgaaaccctattcccactcaacaacttcccatttccccctcccttggcccctggtaagcaccattttgttttctgtttctgcgaatctgttgcctgatttcttttccacacgtgctggttcctgcatctcctctcctgattcactacaattgggactaatcatgcctttcaggaggagagaacaatatgtaattttcacagtggtttttataaaatagagtacctggtacgtgcccactaggatatgcagctccaataaacttttctgttggcataattctttagaatatgttaaagtcatctcacgtagttgaggagttagatggtgaaggcagatctaagcttttaaaactagatcattttgctgcctgtgtcagctagaattgagtctcaactgtccaattcctaggcaaacctctgaactcatcttcttttagggcatgtataatttttgacagatgacagatctgttttaaaaatgtgcttattgtcctttggtattttaatttgatttgttttgagcactcatgttattgtttataaatgtgggccaaatgcatttaatgagtacacgcaattggtagaatactgtcgctctgaataaccttaactctctatggaaggagacacactccattttcatttgtgtaaattctttgctgtaggtcaccactgtagattcacatttcgaatgctgtcaaatcatagaagtattaaaaaatatttgtttttaaagatggctcttattgcttgcattgctttttcagaaacctctctctgttttccaatacggcttttatgtcagtgctggtattaggtcactgtaggctgcccatgtcactaaatttagtttataatttcacaggattttttttaaaatgtgtcatcgaaacccatgtttcttagtatatatcttacatttgccttcaattttcaaacagctaacttttgcagtgatgatacctacataaaagggaattatcattaaaacggtgcttgttaggatggtttactttaagataaggcttcataacaagggacttaaactgagcaaaaaactcaaaaccagtgtgagttaacaatggaatgtgctaaatctcaggcttccttctcttggccagattttaaaacaatcacattgagagcaacaaagttaactggtgagccagtttaaagggaactgaagtttctgataaagtctttccctcttgtccatgggggatacattccaagaccccagtggatgcctgaagccatggatagtaccagacctgattgctgtcactctggacacgtttctgttgtcagctgaaggatgagacagtttgtaaatttggaaaggagctttttgtttctcataaagggtcgcagcctgcaaagcgggcattctgacaggctaggaagcatagcttctggtcagaagccagaaacagacacttcagaggggaagaataagacaacaatttatgctgaatggggtgggtaataggcatattcaataagctatgggggagtcatgaatattcatgaaacgagaaccatgcgcacgcgattgagattcacggtcccatgttcaaaacatggcagtgttagcatgatccaagggcagagttttctggactctaatgtgttaagctgaagctgaggacacgcaggccctcactgcacagcccccacaggctggtggaatgctggtttgttgtttcattgacatcacaaaagggaggggtggtgtcagtctgttggttaagtcctaggtggaatctttggaaagaactggcttttgttcagcccttagggaagaaagcctgtggcctttagcaagcaaggatgggggtgtaaccaggctcatcagacctcccatcccctcacagccacagacccagctttaaggttactctggggtccccttggccaagaggagggtctgttctgtgggttgagagccttaggattttatttttctttcttcttgttcatgccttcaacaagtataaagccctttccatcttaactaagcacttatcacacactgtggctgtaacttctgcagcttgaggtgcgatggcgaaagtattattaatttctttttccttcttcacagtttcccagacggaagattattcttactgcagatcttagcaacctcagcacatgactctttttctttcctcattaagtcaagaacctttggccttttcacttaaaagaagcactctaaggcttcgctttgacataccccagttgccagcatcactactgtttgggaccattaggaagtaaattcagggagacttgaacacaagcactgcttatctcgaaagctgatctgctcaccgaggtggcccttgagcacggacagcctggatctgctgggtaaagggagaagttatgtccagggtgggacagagaggacggcgagagatttcctcactactcagaacagcgggaaattcaaaacttagggattatttctgaaattttccatttaaaattttctatttaaaattgacgaagggtaactgaaaccagagaaagcaagactgacgataagggaggggcctcctgtactccaagagcactgaatctggaaaaactcaacacatcgatggagtcatatatttaattttttcttaaaagccgcctgcggggtattgtagaaacgctgcgctgcctatcacagcttgtgatgtgacacgttcattctgcaagtttaaacttcgcctaggtatttcttttcctgtgtgaccgtcacatgactagttttgttgtgcattgttgtagaagttaacatgtttccctatcgaaagaatgtcatcttctattttctctgtttcttttaagcttttttcatatagttggccttttgttaatggtcagcatttatggctttttgcagacagcatctctttgagcaacaatttcttgaaataaaaaaatatattcttggccaggtgtggtggctcacgcctgtaatcccagcactttgggaggccaaggcggatggatcacttgaggtcaggagttcaagaccagcctgatcaacatggcgaaaccccatctctactaaaaatacaaaaattagccgaccgtgctggcgtgcacctgtaatcccagctacttgggaggttgagacaggagaatcacttggacctgggaggcagaggttgcagtgagccgagatggtaccactgcactccatcctgggcaacagagcaagactctgtctcaaatatatatatattttccctagttggctttagactcttgaccccagcttatagttgtttttgttaaagactgtattattatggtctctccatgggaattatggttttaaaattattttattcattcagcaaatctttatgagcatctactatgcatcatgctgttctcgtgaacaaaacaagatccatatcctgagggagtgtgccttccagcagagaaagacggcagtgtgtaaggagcgttagaagaagatgttgtcttttgtgtgtagaaagtggtatgtaaaagtgaaaaataaaaagaaatagagcagaatcagggatggaggtgtggggcaaattgtaattttgaatagggtagtcagggtcggcacttttgaaagcctgacgtgagcaaagcgaagaaagaggtgagggaattagccacaaagatttctggggacagagtgttccagcctgtgcaaaggcctggaggtgggtgtgtgcctcgtgtgctagagaacagctggcctggctggagaggagtgagccagagggaggacatttggatatgagctcaggtaggtgacaggggtggggcagatcactggggacccttttttccattgtgaggactgtggcctttactctgagtgaaaaacattttgagtaggggagtgacatgtctgatttaaagtagaagatgattgtttctgataaagctgacttgagaagctatttggaaattgtttatgtgataagtcagatagtaatcataagtgacagaggttaaatgcaggcagagaaattcaaggaaattgtcagaaaaaatatttcatctaccgggcatggtggctcactcccagcactttgggaggccgaggcaggtggatcacctgaagtcaggagttcgagaccagcctgaccaacatggtgaaaccccgtctctactaagaatacaaaaattagctgggcgtggtggcaggcgcctgtaatcccagctactcgagaggctgaggcaggagaatcacttgaacctgggaggcggaggttgcagtgcgccaagatcacgccactgcactccagcttgggcaacagagtgagactccatctcaaaaaaaaaaaattaaggtactcacagaaggtaaagaatgtcattaagctgcgtggtatcccagttcctgagtgtcatgagtgtccacagatgtatgagtgtgtatgtgcagtagagtcattgcaggaacatttaggcatgtgaggctctctaggtttggggccagaggacatgagtgcttagaagttttcaggcaagcctcatttccagagtgcccttggaatcactgctatcatcagttggaattagttctttaattaaatcctggccatcgatcagcatccctttctattgcatttgacggagcttacagaatctgtgttgtaaacaaagcagaagcatcttatttcccagaactgtggtttattaacacctaaggaaactggttgtctgatactcatatttttaaaaaatgtgcttagtaattcataatcttttagtccttctagactgtcagcattgttggatatgctttatgtatacttttgttatatgcttatttgtaagtttctttttcctaaatcgagaatctatgtgttcgtattttgtcctactctagcaagctttcagtgggaagagactgccatccgtagtgaacccatatcattttttgtttcttagtcgtttcctcatttgtggatcatagagaccccatttcccacctttttcctcttctagtcagtgtctcattccccagctgctcatcagaagatagtgaaatatgaggggaagtttaagttttattttatagtgattaaagtacggtgaggtttaaaaatactgaaggtggaattttcatagctaccaaacgttgaaaataacacaacatatttcaactaaaaatgaagcaaggtgggtaactgacttcttgaatccctgctggatgatggcactggtgcttagcactttatgtatatttccttcatttaactctcacaaccactcctttatcggacgtcatcattccattgttcagatgggaaagccagtgtccaggcaggccaggagacctgcctgagccccacagctagtaagtggcaagccagcttcaaagtgttgacgtgatgagcctagaacccctgccttcccctattctatgctgttcccaaatatctcccacagttttgcgcctaatagtaatagcttcatctgttgaaaatgacatcaaagttagttttccttccatctttataatgaaaatactttttatagtgcttgactttttctaccctccccacacccacccagtttaccagtccattttgtagattgtcagtattttcggatatgcttttttccccattttttaattgtggtaaaatatacgtaacataactttaccattttaaccattctaagtgtacagttcagtggtattaagtatgtttatgttgttgctcagccatccccatgtctccagaactttttcatcttcccaaactgaaactctgtccccattaaacactaactccccactcccctctccccttcctccacccccagccctacaaccaccattctcctttctgtgtctgttggatatgattgtacttttgttatatacctgtttgtaaagttcttttccatattaatctgagctttccagcttttcaaaggagaataaataccaagtatctggttagaactctgacctctttgcagaacacaaagctggagctgaagctcacccccacccccactcactcccgtggttaacagaatattaaacctgaaaagtacattttaaaaaaagaatgaaaagtaaaaatgtttgggaagttttctggaaactaaagagctaagaattcttaaaggatccggaaagctgtgttttcatacttcagtttgatgcatggattttcagtttaaaagccttttgcataaaaacattaaagtctccttctaaggggtaagaaaatcttcccattctcccaactgactatttgaaaaaaatgttaaaaaagtagtttctgtagaaagtgtctgtaaacagaataatttttcattcacgttaagatcggttcttggggaaaagctgtgcttcagagacaaggttgaagaacttcgcctgcatatgatggaagatgacaatgggaaccacaggtgtcattggtggctttgttttacaaagtcttcacctttctgctgagtcacgggactaagttcaacacaatttctactttccgccttcctttggaataatagttttggaagccaagtattagtatatgataccaggtgtgttttctaaagattcaggttcagtgggctgaatgcactttcatgacttcattagaccactgagcccaaggagaaaagtgccaatcttactagacatgaggaaaaagacacatcttttgctcttgctggaagtggtgtcctactttctacaagcagtcgtcatctggtttatacttgccttgttcagtttttgtgtgatattttattctctgcctaatagatattaaagtatcaagctgtcaagatgattttttaatttagataaattttagaattttttattcatctacttctaaaagggtgaaaagataatgaattactcaagatcaggagatgacaaacctagcactatgaagagctggattctcccctaaatgtttttgtttctgttgcttgcttcataccaggtttgcaagaaagcagtagaaatcccccacatgtacacacacacacacacacacacacacacacacacacacacacaaaatctatctttgcagagttttggaatgaaagaaggagggagttgtgtactaatgacgccgtggttgtgtcgttgctccattatagtgagggagctgaaagggcccattctcttcacagcctggagtcggggactctgaaacctaatctgaagtgtgtttaacgagggttctgaacgctgggacttattgctgaggggaacaaggagacagtgtgtcctcaggggcagtgtggccgcccctagagccacagcaagcaggaagaatcgcagcatttgtggtcagaaccgatgggcaggcctaaacatttagctactttgccccagaatgaaagccttgttccagctccccagggtttggatttaaagttttagttcctgtcggtggtcgcagtttcctgacgagggtgccatccagtctgctgttcagcttttgagtcatttaatttttcttcttccaacttctcctcctccaccttctcctcctccacatcatcatcatcatcccaaatacccattagagctcgcctagtctggatgccgttctaagggcatggtgtatactaagtcgcttaatccttacggtgacccagtgaagtggttcaatctttacgtccattttatgtaagaggaaactgaggcacaagaagtagcttgcctccagtgagtgtgactttgggcactccgttgtcctccagcctggaaagtcccagtagatacagcacagctgaggtgcaggtgtgcaggtatatcaatcccttctgcccacagggtaaagccctagagcattgcatctggtctcaagtgtccagggctcaagtgtccagctttacacagatgttactgctgatgtctggaaagtgaaaaaggtagtaacaccctgttctggcttctaatatacttttgatacacacaggcagaagggcagtgtcaactcatcccctgtaattcattctgtaaatttcccttcaccatcacggtggcagcaataataaagaatgtgtatcatgtgccaggccttttgctaggtactttatggtcatggtttcattgaattctcacattagtcttaaaagggagataataatagcataaaatagcatctctagccctttcatgactcatgtgctgtggactaaattgtactccccaccctaattaatttattgatgccctacccaccatgtggctgtatttggagtaaggaagtacactaattaaggtaaaatgaggtcatgaagatggagctctgatctgatagaactagtgaccttaggagaagagacaccagagggctctcgcttgctgtcactcagccatgtgaggacacaaggagaaggtggccatctgcaagccaggcagggagccctcagagaaccagatcagctcgtaccttgagtgtagacttcacaccctccagaactgtgaaaacatcaatttctattgtttaagccacccagtgcgtagtgtttggttatgtccacctgagcatactaagtcatcacgtttccatctgtgtttacctagcaaactcctactcatccttcaggacccattcaagtgggctacttctaaaaacacattaggtactccactctcaaagaacacctccatcagggagaatagccatttgctctattctctgactttctacagctttttgctagttcctctaacatgccacttaccatgtactccaatttagctggttatttttgtacatcatcgacggaagtagtccattttcacactgctgttaaagacatacttgagactgggaaatttatacaggaaaggggcttaatggacccacaggtccacatggctggggaggccttacaatcatggcagaaggcaaggaggagcaagtcatgtcttacatggatggcagcaggcaaagagagagcttgtgcagaaaaacttttccttataaaaccatcagatcttgtgagacttactatcacgagaacagcatgggaagtacctgctcccatgattgactcacctcctacagggttcctcccacaacacatgggaatctacaattcaagatgagattgaatctacagttcaagatgagatttgggtggggacacagccaaaccgtatcactgacccaaagagagatgctcatcttcttgctttcctttctgtctgcttagcatagtgactgcacactgcaacttgctcgataaatacaccgcagcctcctcaagccatcatagttattaatacctctgcccacctggtcaaaatctgccaaagggctgtaggaaaatctgtgacattgtgatgccctaagatgagatgggtcgagagttggtgggttataggattttgaacaatattctgataggtatcagtggtagggagaagggcacaaggccttcgagaccagccattcccttctactgagtgagagcatgccttggttgtcatggttacgctaatcccaaaacagcaaaaatgaaacacttcccaaaacggctctctgtaaccccaggaggtgcaaaccttgtaaacctggtcaaacattatcaagttctgtctatgagatgatttccacaaggcagtactttagctctctcaggtagggaattaattgatttagatgatttaatgtggtagggagagggagaatatactcccaacctatagaaggaatggtgtctttattcttttagaaaagaaaacaaaacatactcctgcttaaaactttgttatagaaataacctgaagacatagaaatgttgtttctgttgttgtttttgttcgtttgtttgtttgttttgagacagggagtcttactctgtcgcccgggctggagtgcagttgcgtgatcttggctctctgcaacctctgcggagaggttgattgaacccgggagggttcaagcaattctcctgcttcatcctcccaagtagctgggactacaggcacgcgccaccacgcccagataatttttttgtatttttagtagagatggggttttgccgtgttggccagactggtctcgaactcctgacctcaggtgattcacccgccttggcctcccaaagtgctgggattacaggtgtgagccactgtgcccggcctagaaatgttttaaagtcacaataaactggagcaactttgagtcataatttgtaatagcttgaagcgctgtgtgaacatgcatgctatttagtattcagtgcgtacttgccaggctttccccatgaatgtaaacctcctcctaagtttaattttataggctccaatgaaaagccaattgaggatggagaaggcaacagggacacagagcatggagccagccaactggttggtgcgctagattaaaattcaactgccttttagagcatcattaaaagtagccattaaaagaaaaggacaaaaatttcattacatagtttcacgaattgctggtttgttattccaaaatagaacattatagtgactgtttggcctcttataaggagaacccttcaggaatattacgattgagactgatagtgaacggggtggtttcttagagctgatgggagccttagagagatctacccccagccccagcacaaacccttgaggacatcataaacattcatttgggccaggtgcactggctgacacctataatcctagcactttgggaggccgaggcaggatgatcacctgagctcaggagtttgagaccagcctgggcaacatagcaagacctcgtctctactaaaaataaaaataaaaacatcagccagatgcggttttgcgctcctgtagtcccaggttcttgggaggctgaggtgggaggatcgcttgagcccagagattgaggttgcagtgagctacagtggtgccactgcactccagccaaggcgacagcaatacactgtctccaaaaaaatgtttaaataacagaaataattacttttcttggaaaaacaacaaaacactcatttgtcatcagatccttctcatattaaaccattactcacatatatgggttttcaaatgatgcctagataagtgggttttgctttcttgtgtatagtagtctgtgtagccgtgtgtgtgtgtgtgtgtgtgtgtgtgtgtgtgtgtgtgtgtgtgtgtgttttgaaataagttaacctttaagaaaatactttcactgatgaattttccacagggccttttttcttgagttctgtcagcttaatctgtgctgtttccaccttttccccattcaaacttgacttgtttacaggtttggttttttagcaataaaaggctagtggatttgtggctcttgaatctatctcatcgttggctttcagtgcaaagcctgccccaaatgcataatttgccattatttccaaagatgttcagtttattcctttttttgccagacatataaaagagctctttgggtaaagaaatattagcaattatttagtgcatacacatggatagtcacccattttcctcatgtgataaggtcctacctcataatatttttcgaagatctcatgtaaagaaaatagattctttgttttcttatttttaaaagtagtgttaacagattgcattgtgaattaccgttttcagttgtttatagatgtgagccctgttcctcaactactttttctcccgtctgcattttttaaattgtggtaaaacacctgtaacaaaacttaccgtttttacatgtgtagttcaggggcattaagtacattcactcagaggcactaagtacattaagtacatccacatcgttgtgtgattatcaccaccatccatctctagaactcttcttaccttgcaaaactgaagctctgatcctgttaatcactaactccccatttcccctccccaaagcccctggcaacccccattctactttctgtctttatgaatttgcctgctctaggcacctcattgaagtggaatcgtccaatatttgtcctttgatgactggcttatttcacttagaacagtgtctgtaagtttcattcatgatgtagcatgttcctgaatctcctttcttttgaaggttgcatcatcctccagtgtgtggaatcgtcctcctcatactgtttatccattcattcagcagtggacacctgggttgcttctagcttttggctattgtgaataattcttctgtgaacgtggatttacaaaactctgctttcagttattttcgttgtatactcagaagtgagatcgctgtatcctaggataagactatttttgtaattttgagaaactgctgtactgtttttccatagtggctgcaccattttgcattctgggatgtgacgtggagcagaattaccttcagagtgaagttcaaaaactcactgggaataagtacagagaaatgatgctgcaagctgatgaaataaatttactataggaacaaaaggaagaatcattttcttaatgaaatacaagctctttctttgcctctcttctccgagaagcttcctcagaagcaggctttaacctggtgtgcgttgacacacttagatagttcaggacccctttctaaaagaaagggagaggaagtccttgaccatgagggtatctttatgtcttgaagcgctttaggcttagctgcccggtacacattggggtgttaatgcacagtccacgtagcacatttgtattcgtccattctcacagtgctataaagaaccacctgagattgggtaatttatgtagaaaggaggtttacttgactcatagttccacagcctcttcaggaagcatggctgggaggcctcaggaaacttacagtcacggtagaaggtgaaggagaataagcacgttttaccatggtggagcagaagagagagagagcccaaagggggaggtgccacatacttttaaaccatcagatctcatgagaactcctcattatcaggagaacagcaagggggaaatctgcccccatgatccagctacctcccaccaggtccttcccccaacattgggagttacaattcaacatgagatttgggtggggacacagagccaaacatatcaccattgtagtgccatttacccatgccattgtcatgtagtgggtgcatttcagcccttagtgatgttacatacggagtttccttacaaccatagatagagccagtattcacaggggaatttgtgtaatgctttatggacatctattttacagatgaattttagaagctataaatatactattgaaactataagttgacatcaccctataaaaatttggtgccaaagaaaagtcattttctataaacattttgtataaaataattttaacagttttaaggatcgacttgtgatttattagctagatcctaagtctctactgcaaacccatgacaatgcagctagttaatcatcatcgtttcacttgtctctgacaggccctaaggagtgtgcagtgctggggcggcaaggctgcaggttctaggactcaacacgccctcatattgtatgcactccatacattcacagaaaccgctgctgactcgttggagtacccagtgtagatgttaactctccccctcccctcttctaaagcgctcagtttaacaccatgtccataaagacatccactgtatattagttttttttttttaactttttgagatttctagtattgaatttttaagtctcatttcccagactctgtaaatctagatgaagttatcaaattcccttagttcccagaactctttgggaaatgtgagtgcttgccagctggtcagataattggtggtttattttcatcacagataggaaatgttaagagttatgagaaagaaggttctgaaactggaatgtgttcttcctttaaaagaaaatcttacagtatgggaattcttccacaagttcttatcctttggtccatttttataatgttctatttttccaggctggagtgcagtggtgtgatctcggctcactgcaacctccgcctcccaggttcaagcaattttcctgcctcagcctcctgagtagctgggattacaggagcgggccaccacacccgggtaatttttgtatttgtagtagagatggggtttcaccatgttggccaggctggtctcggaactcctgacctcaaatcatccacccgcctcggcctcccaaagtgctgggattacaagcgtgagccaccatgcccggcctataatgttcttattaatgtctgcagattttattggagtgagaggtggaccccgaataagttgctgtgcataagttaaccatgcagctcttggcagctggtgtggggactcaaacccaggattagggactggaatggagcagctcattgctccctacattaaccgacctgggaaatgcttgtctgaccctgtgtgtcggaaacagggcacattgctgtagcaaagtggtgaagataagattggtgatcagtgttccactctgctctcctgacccatttcctctggataagcatgcctggagaagaggagagcttggcagggaagaatgggggttccacgcagtcacatgtgactcctgacattcctgcaggtgatgtgactctgccactgtcaggcatttaagatctagagcctggagagtttggggatcatctgtgcagaatgtgtatcttctggattgcagtgagggcgaatgtgggggtgtaaagcggcatctgttaaaaaaaaaaaagtacttaatgttgagcatcaagcagcatctttcttggctcctctgtttcatgctggtacaggctcatggacatgtccatccgtgtacttggcgggctttgactcctgctgtcactcagtctccagggttactaattggttcctaaaatgctctgttctcagggaagaggtgagaagtataaaacaagtaactgtgggctgggtgcagtagctcacacctgtaatcccagcactttgggaggctgaggcaggccgattacgaggtcaggagttcgagaccagcgtggtcaacatggtgaaaccccgtctctactaaaaatacaaaaattagctgggcgtggtggcgggcgcctgtaatcccagctacctgggaagctgaggcaggagaatcacttaaacccagaaggcggaggttgcagtgagccaagatcgtgccactgtactccagcctgggtgaaagagggaaactccgtttcaaaaaaacaaaaacaaacaacaacaacaacaaaaataagtaactgtgaatggcaatgtcgtgaaagcatttgtctcccaagatttgatctatatggtggaattgatccattttactatcagtcactgggaatgtacatagtgaaaagaaattgaggcatatgattctaagctctttagggtagaacgtgggttcttatatataatattccctttccctatagatccagtatgtagaaaatgcatgaatagtattgatttcagcagacattgattgattgccaggtgctgtgctaggcaataagaatacaaagatgaccaagtggcctgatactaactggggacatagacacataggtactaaaccatctataatacagtggaatggataacttttattgatttgttcattcgtttccacaaaattggttggtctttaggcattgtggatacagggatgaacaaaatatggcctttcccttcaatgtgggtatagtctcgatgagatactgcacagagtgctacaggaatgtagaggaggaaaccatccatgtcatatttgtggacaaggagagaggcacagggacagggctttgactgttacaaaaaaggcctggggtcatgagttgaaaacttaatgtccacataaaacctgtccagaaatatttataacacctgtattcataattgtcaaaactagaagcaaccaaaatgtccttcagtaggtgaataaactgtattacatccagacagtggaatattattccacagtaaaaataaacaaactggctgggtacggtggctcgtacctgtagtcccagcactttgggaggctgaggcaggtggatcacctgaagtcaggagttcgagaccagcctgaccaacatggtgaaaccccatctctactaaaaaatacaaaaattagcggggcatggtggcaggtgcctgtaatcccagctactcgggaggccgaggtaggagaatcacttgaacctgggaggcggagattgcagtgagctgagatcgcgccattgcactccagcctgagtgacaaaagcaagactctgtttcaataaataaataagctaccaagtcataaaaagacatggaaggggcagggcacagtggctcatgcctgtaatcccagcactttgggaggctgagggaggtggatcacctgaggtggggagtttgagaccagcttgaccaacatggagaaaccccatctctactaaaaatataaaattagcttggcatggtggtacatgcctgtaatcccagctactccagtggctgaggcaggagaatcagttgaacccgggaggtggaggttgcagtgagctgagatcacaccattgcactccagcctgggcaataagagcaaaactctgtctcaagaaaaaaaaaaagacacagaaggatcttatatgcatattactgaatgaaagaaggcagtctgcaaaggctacgtactgtatgagtcctgtatgagtccagctagatgacattctgggaaaggcaaactatagagacagtaagatcagtgttcgccagggattaggagggagggagggaggaatagctggaacacagaggagttttagggtgaaattcatatgaagcagtgaaactattctgtatgatgctgtaatgcagacgggtcacaacacatttgtcatagaactttacagcacacggagtgagccttgtgtgagctatggagtgtgagtgatgatgctgtgtcaatattggctccacaactgtagcaaatctctaccaccaaggttaataacgggacactgtgtagcgcgaagaagtttttgctcaactttttgtaaacctaaaactactctaaaaaaatagtcgattaattgaataaggtgggaggagtgatgcctggcgttggagtgggaagaaaatgctaagagatttgcatccaattttgggaacagcaggtgctgggatacggaggtgtagatggggctggcgttcagggtgtcacggaggtgggcggtggcaagctctgaaggacctgcagacttaggaatccagaggtttcctgcagcgaggagctgtggtttgttttcatccgtgcctgcctcagggataacccctgttgtttctgctcacagcaaagagctcctgggaaggtgctgctggatgcagtttgcaaccacctcaacctcgtggaaggtgactattttggcctcgagtttcctgatcacaaaaagatcacggtaggtgatgtcaacttaatgttactattttactgtctgttcatcttggtggggggctgggcaggggccagtctaaatgattgtgagtgagatattttcatgctgtctgttttgtctgtgaagtcttcaaatctggtgtgtatttgacacctcagtacctcttggtttagactagccatgtttcaagtgctcagtcatcacatgtggccaagggctatgtatcggccctcacagttctatacccaaactaatatgtttgagaagctgttaatgcatttaaaagagagtgtgatatgatctgatttctggtttagaaagagaactgtaggcagattggaataggaccagactggagtcaagaaagccatcaggatctagcgatgagtctggttggagatggtgctggctagaactaagggagagtagaggggctggcaggagctggatggattccagaggtggggttgggggcagtaggagaggatgtgattgaatgaatacccctgtggaggagagggcttggagtggctcagttttccagctttgccatctgggtggacagtagtgcccatccctggggaagaccatgcccgggggtgaagatgagtcccattccagcttgaggaggcaggggcatccgtggcattcagtggagacatccagcaggcagtgccagaaggtgtatttcctggagcacgggaaagagatctgggtggaaatttggattcaagaatcttgtgattattatgaatgtctgtcgaagctctgaaacgggatgagaacattcattgtgaagagaaggtggccacaggtgggacggcagcatctacgggaagagccgtcagaggcagtgcagatcgagcctggctctgagcagagcaggtggtgaatgaacggatctgtcatgggcctaaaaatgagaacaagttgtgttttctcaatttattcccacctccaaacactctgtcgttttctagtttgtacttcaaatccaagattccctgactcccagccctttttacagtgtggcatatgaccacagacctgccaaatctcattctgccttctcctattcagctaacaattattttgtgcctacactgtgtctggcatcagacttcacatgaaaggtgagataaagtgacagctagcaagaagtagttacggtttccattcactaggcacacacagcttctgaagagagtccaggaaacaattagagtgtagcaagttatgcggaatattgtttcatgctcttatttcatggtaaaataatgattctcaaaacacctgaagataccgttatctcattatttctaacaaccccgttctgtgcctgcctgaattcctttaagctcctgatggctttcctgactccagtcttgcccaattccagtcctgcaggagctgtttgtctaaaccagaaatcggcagcagtgtttgggcttcacagctgagggcgctaagattctaagaatttccccatgtctgaatctaccagttagctaatggcacagctaagattctgtgttcttctgactccaagttcagcgtctcttctgttaaccataggtgcttctcttttgctagaatttgtaagcctattgttctttctaggtaccgggcagggctgacttctttcaagttgttaccaggcttgacttttatgatttcactccattcttacactattgtttaggaatgtattcaactgcaaaataaaacccaccgttgatgacttaaataagtaagtgtttgtcacatgtcacacaaaagccgccccatgagtgcttcctatgtgctggagtgttctagtccctatgggtacagcagcacgcatgacccacgttctacagcaggggtcacaccttctttgtaaagggccagagagtactgtaggccttataggccatgcagtctctgctgcaactatttgaatctccccttatcatgcaaaagcagccacagataatatgtgaatgaatacatgtgtttgttccagcagaacttcatataacaggaagccatagtcggccaacgcatgctctagagagtgataactgccaggcaccgtgctaggttcacatatagtgtttcatttattcctgcaacggtgcattatagcccctttttctgatgaggaagttaagccttaaagaggttaagttgttcacccaaaggcacacagcaaagaaatgggattgaagctcggatctgtagaagtgccttccctcagtcatcatcttgttctgaccatatcactaaactgacttgactctctgttaattactgaattccagcctgagctaattgcatataatttttttttttttttttttttgagaaggtgtctttctctgtcgcccaggcaggagtgcagtggtgcgagcttggctgactgcaacctctgccttctgggttcaagcaattctcctgcctcagcctcctgagtagctgggattacaggtgcccaccatcacgcccggctaatttttgtatttttagtagagatggggtttcaccatgttggccagactggtctcgaactcctgacctcaggtgatccgcccgcctcaatttttaaaagttcttttgaggccgggtgtggtggctcatgcctgtaatcccagcactttgggaggctcaggcaggaggatcacttaaggtcaggagtttgataccagcctggccaacatagtgaaaccccatctctactaaaaatacaaaaactagctgggtgtggtggcgcacgcctgtagtcccagtgactcaggaagctgaggcaggagaattgtctggacccaggaggcagaggttgcagtgagctgagatcgttccactgcactccagtttgggtgacagagtgagattccatctcaaaaaaaaagttcttttgatagaatggatctgtggtaattgaggggatgccgtaaatgactggaggagttatagggattgctgccagggtcttgggtgtgttctctctcttgatctggatgctggttccgtggatacaatcagtttgtaaaaatccagtgagttctgccttacaacatgtgacatcgataacttcaataatagttacagatgcaaatgcaatgaaagttccaaaatgcaatgaaagcacacagtagcagaaatgatgaccaaaaggtcatcagacagagtctattttggaagtgccacaggccagtcttgcttgtatgaactgaggaagagcatctcaccttgtgagaatcgtaagcaccagctggattttcccctctgccccagacacagttgcttgacaatgtctcttagcgtgcaacccagtgtctgggatccattgaagtgttccaaaagcattatttatggaaacttgttaccatcgtcatcttcgtagttattatttttttaattgtggtcaaaaacaagtaacacatttgtaaccatttgtaagtgtgtagttcagaagtgttaactacatgtactttgtcgtagagcagatctctagaatttttttatcttgtgaagtggaaactctacacccactgaagaactccccagttccccttccccagcccctgttctactttctgttactgagtctatctactttagacacgtcatcaagtaagtggaatcgtgtggtctttgtcttttcgtgactggcttatctcactcagcataatgttcatctgtgcagtggcatacaacaagctttccctccattttaaggccaaataccatttccattgtgtatattcaccacgtctccagtatccattcctccatggatggacacttacattgccgtcacctcttggccattgtgagccatgctgcaatgaacgtgggtgtgccatcactattattttttaatatcaccatcgtgactgtcacctctgccagtcttcatttgggagactgtgcacctgtcttccaacctgagaaaaagcatggttggtttcaaaatgcccaatcatagggctgtaacaactgggttcaccccatttctctgtgtgtgatgtgtgggaaactagtttcccccaagcacctggcatgtcaggttgtgaatccttgtctctaggcaataagttgttgaatttaggcagcttgaatttctgcccagccttctgtctttcttctcatcatttctgtcttataaatacccaagtcagagccttattcatagtaaggatgtgaaggagtttaaggggaaaataagggtttttcatagtctaagacgtgtttctcaagattgtaaataaactactgatcattatgaaataattatgttctacccttaattagacttgtcccaaggcttgtcaattaaaagagttgattgcagtgttgacacgcaagcttggcctgctcttgcccttggctcttgtcctgctcttgctcttgtccagcactgtccctaaaggatcactccacaacagaagtgttttaatcagctgtttaaaagtatagattgagctttccatggcagaaacactactgatcatgggaatcaagaccccgtgcttattacggctgctaattggtacatagagtctgaaggctgggaaagggccagaaagccattagatggccatgggggcgagttccgggagctggccaggggactccctcgaaacggactttgcaggattcttgctaaaactggacacggaagcctgaggctgaggcctcatggagaagaggagcctggctgaagttcaggcctggtgagaggctttgttacactcaactctgtcttcacagagcagaagcatccgtagacgatgtgaaatgaatggatgtggctgtgttccaatacagctttatttatgggcacagagatttggcttttatatagttttcacatatcacgaaatgtgattcttttgattttttttttaaccactgaaaaatgtaaaagccaatctctgcttcggacctgtgccagaacagggagtagcctggccgtatttggcccatgtgccgtagtttgccaatctctgtggtaggtattctataacccaaattttacagtgagcaaatccagagaagtaacgtgcccagtccttaacaatgaaatgtgtaaccaggatccacacagagcctctcttagctaaagctcatgttctgtatgtcgcatgtggctgcctgtccttggatctcccgtcggaaagagctgcacaaaccgtaacagcagagatagttgtatacggaaaatttatctcattggcctattgaggctagctggaaaagctctgcattgtggcttgcatatctgtttaaacattcgctttgtcatttagctgctaggttgattcttaacttccttgattttgcacttcatctgagaaatgagaggaataaatgaccattttacaaggttattatgagggctaatcagatactttacaatgatgagcccagcaggtctcatggcacatagtaggcactcagatatctgttgtatttcatttttgcaatctaactcagaaaccagtgaagccagcccaccactgttttattaaaatgacattgtggctgggtgggtggctcatgcctgtaatcccagcactttgggaggccgaggcaggcagatcacttgaggtcaggtgattgacaccagcctggccaacatggtgaaaccccatctctactaaaaatacaaaaattagcccgtttggtggcacgcgtctatattcgcagttacttgagaggctgtggcaggagaatcacttgaacccaggaggcggaggatgcagtgagccgagatcgcaccactgcactcaagcttggcgacagagcaagacccatctcagggaaaaaaaaaaaaaaaaaaaaaaaaaaaaaagacaatgcttactggcctgataaaatcaattctggtttcttataaataaatactgtcgaagctccaggaagaagattggcaccttgtcattcattttctgtcctccatgctaggagaaaagctttgtcaatagtgggactgcttttgaggggcaggaggtcatggaaactgcagttcccggggatgacgggcatcccttgctggaggtttctagaccctgctggagtcagacacacctccttcatctgtgcttagccgcagcgtctgccctcgcttcttcctaggggtctgaggacctctgaggtgaggaggagctttttgaggaacatgggaggtgtaaaggatggagaatgtcacaggatcgaggacagcctgcagctgtgggaagccagcagaggtgaggttgtacagcggctcggtcacctcgcggggcagcaccatctaatggtgactgtgttgacaggcaggtccccagaggaggcaaagctcccctcaagcagagagtctgggaggacaggccctttggaaaatacagctgtgggagatgctccagctctcaagtgggaaggagaataactgattttggggcttttagtgttttgtttgtttaattaatagatttaatatttgtattgcagttttaagttgacaacaaaattgagccagaagtacagaggttcctatatactgttcccgctctgtccgtacttacagtgtcccccgttactgacactgtgccttcgtgtggcatgtgtgtcctcgctgatgggccagtgtcaatccattatcattcattcactgcggtccaaacttgacattaggcttcactcttgctgttgaacattctgtgggttttgacacatgtttctggacttgcatctaccacaacagtattacacagagttgtgttaccgccctgatccttccctgtgctcctccagttcctccctctctcctcgtgagcacctggcaacccctgatcttttccctctgtactttttaattttctgtactctctgacacctgaggccttgttgactggggagctacttcccctccccgggctagccaattcttagagatggcaaatggctccctgtgagtgtaccctttatttgccaattaaccaatccagaggcctatccagccacctccttcctgctggttctgacactccaggaggcaacagtcaccttcagggccaggtacccacaaccagagccaaccacaccccagagcccacggaaatgatgcagatgagccagtgctaaacctgcttaccctgcccagcctcgcctcccctgcccagcctcgcctcccctgcccagcctcgcctcccctgcccagcctcgcctcccctgcccagcctcgcctccccacagaagcgatcctgcccttgttccccctccccctctccctctgcctccagcccagccctggtacttccttgtggagtggtgggccccctcctcttgggaactgtgagtaataaaccctcttctgaatggcagtggcctgctgagctgttggccgtatcatacctgaataagaaatgtgcttgtgttaggccatttgtgttgctataagtaaatacctgaggctgggtaatttataaagaaaagaggtttggccgggcgcggtggctcacgcctgtaatcccagcactttgcgaggccgaggcaggcagatcacaaggtcaggagatcaagaccatcctggctaacagggtgaaaccccgtctctactaaaaatacgaaaaattagctgggcgtggtggcaggcgcctgtagtgccagctacttgggaggctgaggcaggagaatggcgtgaacccgggaggcggagctcgcagtgagctgagatcacgccactgctctccagcctgggcaacaaagcaagactccatctaaaaaaaaaaaaaaaagaaagaaaaaaagaaaagaggtttaattggctcatggttctgtaggctctataagcatggtgaggcctcaggaagtttttactcatggcagaaggtgaagtaggaacaggcgtgtcatgctgcaagagagagagcaattgggggtggggaggcaccacacacaaacagccggatcgcccatggactctgcgtggaaacatgcttattacccaaggagctggtgccaaaccactcatgagggacccgtccccgtgaaccagtcgcctcccgccaggacccacccccaacactgggaatcacatttcaacaagatttggaagggacaaatacccaaaccatatcagtggttaaagaaaaaatacatagaaataatatgtttcaaaatggatatgcagttctaagaaggtggtggtggtggtggaagcatagtttttagatcttctcaaacccaaggccgtacataaagacagctacttagcaaaatcaaaaacccacagacaacatctgtggcaaaactagatgccatagtaagtcctagatcccaaagaacaagcagctggagacagaacatcagccagccccaaggcctgcacgccatcggtgtgtgtttaggaagaaatgaggaaacaatagggcgtctgatgggtggcagaagagaaccctcaaattgccactggaaatcacagggaaatggtttgagaagagcagctgaaatgggtaaggcctaacagggctggagcagctgtgctccagtgaccagtaactgccccttgagacgggccatcactcaagagagactactgagaggggagcccatatggaactgagttgggacaacagagagaaatgacagagaaggggagggcaatcgagccagggaacttgagaaagcacgcttccatatccttcaacactgtacagaaacaatagacaaggaagctctgggagctttgaaaagctactctgaaccatgactttaaacaggttaggaaacaattttcacataaaaatgagtaacaaaaatgtatcaaggtcataatgatatttaaaaaacagagacttcaatgtgttcttcctgagacaccacgtttggccttgccaaaggattcaggtggatccagctgccaaattgtagaaactacagggaagatgatcatgttgaatagtactgtgagtgtgcagtcagcaaaatccaaactccaggaaaccctacaagtcaacagtgaggaaaagaaagagatggaagaggaagctatagattaaacaatataaactcctgccctctacaagtaacctccatgcagagtttcagagtaactgcatatgtttgtaatgttttatttcaccacatcgtgcatctttatacaccagagtttagtcttaagactataaagactaagcaatttgggggtgggggcaccacacacttttaaccagatctcccatgaactctgagtgaaaacatatttattacccaaggggatggtgcgaagccattcatgagtctcaaggctagagtggtttagtcttaagactaaactctggcgtataaagatgcaccatgtggcaaaataacacattacagacttatgcagttacgatgaaactctgcatagtggttacctgtagagggcgggagttcagtttggaaggagttgaccagcagagtttgatttcttgacttggttgatagatacaagggtgtttaccatctaataattcactaagctgtacatttgctttgtgcagtattattattattactttttgaaacagagtttcactcttgttgcccaggctggagtggaatggtgcaatctcggctcactgcaacctccgcctcccaggttcaagtgatcctcctgtctcagcctcccgagtagctaggatcacaggcatgtgcaaccatgcccagctaattttgtatttttagtagagatggggtttctccatgttggtcaggctggtctcgaactcctgacctcaggtgatccacctgcctcggcctcccaaagtgctaggattataggcatgagccaccacacccggcctgctttttgtagttttaagcatctgtttattttaatattaaatattttttaaaggttgaaaaggaaaaaggtatacagcagaataagcaaatgatagtttaaagggttgtatagcattttatctatagttaacactgtgttgcatgcttaaaattttgagagggtagatctcatgttaactcttcttaccacaatttttaagagttcaattaaccataacacccatgtgaaatcttttgaaatgagtcattcgaagctaatgaaaattaaacaaatgatttaaaaatagtttaaactgagtaattgatgttttgcaaggaccatgcctgaggtctgctgaatcctggttaagaagtaaagattgtagatattaaagcttccctccaagtccaggctccctgaaaccccacacattgcattgtaatattgtcttggtttgattccaaagcttcccttcacatatatctctaataccaactcctacttaatgagttcagtacacaagtgcatagggatagcctgtactacatttgattttgtagtttggtttgcagatctgtctttaatttctttttcatttaaagcttttttggtaaatacgtaaaaccatattctacgattttcagttcaaattttattaaacacagattcccttcaccagattagtgttgtcaaaaagggaaggtagggagaggtagtaggatagatgaaaagagacttagaggacataaccagatatgaaacatggtcttggtttggacgttagttttgacagatcaccaataaggacgttctttagttaattggaggaatttgaatattgcctgagtatttgatgagaggaaagtttacaaaatggagaggtacaaatctttgaaaaaagaagtagctgataaaacaattttgaaaagagtctggtaggattcttattaaactaaatatacactaatttttttgacacagcagttctactcctaagtatttacgtaagagaaatgaaagcttatgtccataaaaataagtataaaaatattctttgcagttttattcataactccaaactggaaatcgcacatgtgccatcaagagaagaattgttaaacagactatggtatactacattatgtagagggaaagaagtcttagacaaaattatattttcatttatccaaagttcttaagctttaggtaataagcacttgaaacatagctagtgcaaattgaaatgtaatctaagtatgaaataggtgtggaattccaaagagtagcaaagaaagcaaaatatctcattaatcatgtttttatactgattacatatttaattggtaatattctgcacagatggggttagataaaatatgaaaccatttttaaaattttattttggtgaccaggcaagatgtctcatgcctgtaatcctagcgctttgggtggctgaggcatgtggatcacttgagctcaggagtgtaagaccagcctgagaaacatggtgaaacccctctacaaaaaatacaaaaactagccaggcatggtggctcacacctgtagtcctagctacttgagggggctgaggcaagaggatcacttgaacccagaaggtagaggtttcattgagccaagatcgagccactgtactccagcctgggtgacagaataagaccctgtctcaaaaaaataaaaaatctcattttggtttttaaaaagtatatgaatgtttatattcatacacatcacatataatgagagatatggaaatgtatgtactaaggcagtggttcttaaagcatggtccacagaccaacaagcagcatccacatcacctgagaactggctaggaatgcacattctcagggccgcatcccagattaggaactctgggaacagggcccagtggtgtacgtttcaacaagcccttacttagggcaattttaatacatgctcaactttgagaaccacttccctaaagtgttaatgatgatctcctaatggtgaaaaacatatttttaaaaattttccgtatttgaattatctaattttctagattacatatgtttaaattgtaatagattatttttaaaattaatagggtttttttgtggcatcccacaaaggttgatttctttgtggcatccacaaattgtgttttcattttcaatactttcccatttccccttggtttcttctttatttaaaagtatggtatttcatttctaaatctatgggagatttttcacaaattcttcaattgttgctttattattgaattccatagtggtcagaaatcatagttcatatgacatgaagcttttaaagtaatttactgatacttgttttatggtcccgaatatgtcttatgttggcaagtgttttacatgcacttggaaaagactgtatgttctgtgttgggtaggatattcaatatatttcaatgaggttacgttgttcaaatctattatttattttctgcctacatactaatattgagaaataaatattaaaaatctctgtaattataattgttgatttttctacagtcatgcgtcacttaacgatggctatatgttctgagaaatgtgtttttaggcaatttcattgtgcggacatcacagagtgtacttacacaaacaggtggtgtaagtacggttgtctctatagcatattactgaactgaatacaataggcaattataatggtaagtatttgtgtttctaaactaaaaaaggtacagtaaaaaatacaggattatgatatataccactgacgtattatgcgcctgttcttgactgaaatgtcactatgcggtgcatgactgtttctccttgcagtctcatcagtttcctaatcatgtattttaaaattgttattaagtgtataaatatttaagattgtttcgtgctcttgactaagtgactccattatcattaagaaattacccttttaaaattttatttatttatttatttatttatttatttatttttgagacagcctcgctctgttgcccaggctagagtgtagtggcacaatctcagctcactgcaacctctgccttccaggttccagtgattctcctgcctcagcctcctaactgggactataggtgcccgccaccacgcccggctaatttttgtatttttagtagagacagagtttcaccatgttggccaggctggtcgcgaactcctgacctcaggtaatccacctgcctcagcctcccaaagtgctgggattaggcatgagccactgagcccggccaagaaattacccttttttaaatccccagcaatattctttattctgacatctgcattgcccaacactaatatagccacttcagtttttaaattattattttttagtatggtgtactttcacccttttttgtttaacttatttgtgtctttacattagcagtgtatttttgtaggcagcatatacttgcttttttcttttttaatccagactaacaatccttgccttttaatggggggtggaggggttagaccatttacatttaatgtgattattgatatagtttaaattgaacaccttgctgtttgttttctttttgtctagccatcatcttttgttccttttatctgccttcctttcaattgaaattttttgatgacttcattttatatcctttgttgttatccttccttttgcttatagtagcagttttctgagaatgtattgacaatggtgaggacttactgtacattaggctgcttaaagtgttctacagttttgttgctttttaaattttgtgtgtgtttcattttggattatttctattgttaggtcttcaagtttagtaatattttcttcgggaatgctgatctgctgttacagtcatccagagagcataacattttatatctcacagtatagttttcactgtagaagtttagcttggatctttttttatatcttccatatctcaacttttcaaacatatggaatatagttagaataattattttcatgtccttctctatggagtctgtcattcgtgtgagttctaggttagtttttactgatttttgttgtttccttgtgggtcacattttcctgcttcttgtacctgatttttaaaaattggatgtcacatatgctgcatacttctgtattactgtaagttttattgaatttgttctgggatatagttatttggaagcgatttgatccttttggatttggtttttaagacttgttagcctggacactgtagggcatagtctggggtgaattattcccgactactaaagcgtgactcttcagcactctgccaaggccccaggaatcatgaggttttccagactggctgatgggaataggtagtattcctggccctgtgagcactaggcactgttacctctaatacatttctgtttttttttttttttcctgaccttgactacttcccacacattcaaggataaccccctgtggctctcctaagttttttttgggtatctctctactccctggtactctgtcctgtgaactcgcatccctttggcccccctgaactctcccctccatctcttgcactcatggatttggccgcatcctacctgtgttcctccttcctacaccagagcctggaaactcactcaaggcagcaggctggggcgctcacagggatcacattttcattttcctgtctcttggagatcaccgtttctcactgcttggtgtaccatgttttcagatctgttgtgttatatattttctccatttttggagttgctttgtataggaaaataaatccagtccctgttactctattttgaccggaagtgaaaatctctagaaagtgataggtgtttacaagaaagccacacttaacatatcttttaaatataaccaaatgtaaaattaataaagtcaaataatttttaaaattactttgaaacaaattattacaaagaattcaaagtaaagtttttttgtttctttctttttctttttttcttttttctcactctgtcacccaggctggagtgcaatggcgcgatcttggctcactgtaacctccgcctcgcaggttcaagtgattctcctgcctcagcctctcgagtagttgggactacaggcacctgccaccacgcccggctaattttttttgtattttttgtagagacggggtttcaccatgttagccaggatggtctcgatctcctgaccttgtgattcgcctgcctcagcctcccaaagtgctggaattacagacgtgaggcaccgcgcacggctctttctttttcttttaggagtcaactgcagaaagactaatttgttgcaatgaattctagacactggatatttttctatgacaaatattttcttggctcctatatgtgttacagttgacaggttgtttttgtcatatgctgttttggtagttaagaagagaactgaacttttgttgagtcctttagctttggagggaagcatattagtcttggattcagccggacttgatgtcagattcaagctatgtgacattgagcagcttgaataagccctctgagcttgccttcattcatgtgtgaagtgaccacattgttttgaatattaaatgagaatgtgtgaagcacttacccactgcctggcacacagtgggtgctcaagaaatattagtcccttccctgcccctgctctcatatcaaataactgattatcttttaataagaccctttccaaaacacctcaaacattccagttgcttatgaaatccacctaaaacatcacccaccaaaataatagggggaaaaaggatgttttgagaaagaggagaacagctttggggatagtgattcagcttgccctgcctttgatacgttggccttagtatctcctctcacctccgagtacagccacaggccacatactgaccttgtggatgacagactgcgtgtacgatggtggtcccatgagactataatcctgggtcttcactgtaccttttctgtgtttagatgcacaggtagttgccagtgtgttggagttggcctcagtattcagcacagtaagcggttgtgcaggtttgcagcctgacagcagtaggctgtacctggccttggtgggtggtaggctatgccacctaggtgtgtgtaagttcactgtatgatgctcacacaatgccaaggtcacctaatgatgtgcaaagcacacatgtgttccaaacggggaaggtagcattaacagggcatcagagacaaatcggattggaggaaagaaaacagggcgcctgactgaaatggagcaagatgggctcaaaggcggtattgcagctgaattatggaagaacagtgctacgggctgaatttgtcccctccaaaattgtgtgtgttgaaaccctaaccctgaattcctcagaatgtgagtgtattcagagattgtgttgcttttttttttttttttttttttttgagatggagtctcctctgtcacacaggctggagtgcaatggtgctgtctcaaatcactgcaagctccgcctcctgggttcaagcaattctcctgcctcagcctcccgagtagctgggattacaggcatgcgccaccacggctggctaatttttatacttttagtagagatgggctttcgccatgttggccaggctggtctcaaactcctgacctcagatgatccacccaccttggcctcccaaagtgctaggattacaggcgtgagcgctcagcttaagtctctgaagaggtgattaagttaaagcgaggcccttggtgtatgtaggccctactccttaaaagaggccacttggacagacactggaaatgctcgcacaggggaaagaccaggcaaggatgcatcgaggtggcagctgtccagaagccagggatgggggctctaggagaacccacagctgctggcacctgcagcctccagaatggtgggggaataaacttctgtagtttaggccatccagtctgtggtacttcgttatggcagcctcagcaaactaataaatacagtaggccttcaaaccctggcagaggcgcctggattcagtaagcaggtgcatctttgaatcctactgatgggcaatgagatttctctagaggtccattcatttcagccagatgcctttccagtcaggccatgtggatgtgtgagtgtgttcaagagatcagcggcatagatttcagtgagaacaggggctacggtttggttgaaggggtaggagtttggggttaaagagatcataacaaatgtgaccctctagagaaagcttatggtgtttttgttaccttttaactcatcggtaactggtttctgtgtgcttaggatgcgggaaaaagtgactagcccaggatgacctagtccagctccgctcgcctccctgtgaccctcgctgcatagcaaaggccagtgctttcactgcagttgagtggcaacctcttttttctttttgctgctcccagctcatccatttctaatggtttaagtccagcgtgccccagaccttctccctcagctctgcaatctcgctgggaaacagataggtcctcacaggccatgcatcctcacccagcctggttgcgttggggtgtgatcggcttcttgcagtgttcccgctgcggagctgctgaacacactgaattacccaggcccatcttgtgctcccagccccatgtgttataaaaccacatgctcccttggctcaaataggtgcttgtgtttgatgctttccacagaaatgccagaaacagaggagagatgtttaaaaacaattcataaaataggcaactgcactgccaaagtgtcattgattcgtcctggggagtttgcagaagtttaggctggttctgtggccaccctggcagtggcaagagagtttagtggctgggacagcaggctcccagtgcgctctctggttaactcaccctctcaggcagcatgacagtttggaaacttctccactctcctgtatcctccagccctctgattttacaagggaaacagaaggcatcagagaggaattttcttgttttcctaacacagaaaggtgaacctccttcaatctgtcattagcctgtccctgtccctctcacagatcgaaggaggatgaacctcctttgatctgtcattagcctgtccctatccctatcccttaggatgttgtttccatcctaagccagtgtcctgggttttagagctctgtgttcgcatcatctcaggtctctttggatatcggtcatcgcctcttgcccctatttttaacccctccctttcttaaatacatgcaggtcattccagttaaaaacaagtaaacgggttgggcaaagtggctcatgcctataatcccagcactttgggaggccgaggcaggtggattgcttgagcccaggatttcgagaccagcctgggcaacatggcgaaacactgtctctacaaaaaatatgaaagttagccaggcatggtggcatgtgcctgtagtcccagctacccgggaagctgaggtgggaggattgcctgagcctgggaagttgaggctgcgccactgcactccagcctgggtgacagtgagacgctgtctcaaacaacaacaacaaaacaagcaagtgaacaatacccttacctgattccccagccagctaccccccattctgttgcctcttgcttcacagccaagtttcttgacgaagccattcatcctcttccccatgcaccagacgttcagacccaaccctgggtcaagtgacctgctgaatcactgagtcaaggacgggtgtgagtttgagacagttctcagtttcttcctttgcggacactgtcatcccatgatgtccatgacacagttctctccttcctttacttcacgcctcctctgctcctacctggctgtccatggtggacatattggccaacgctcatgcattttaattctttagactctacgctggccgtcttatcctccatggagtcagggtggtggcaccttctaaatgtgagatgtcttgcccaggcttctcctctgagctccagatgaatgtgtgtcattgtttgtatactgtctctccctgtatgatccaaggacacctcagaaaattaactcggctggaacctctcagtcccagtcatcctgcagtgctcgctatctctggaggtggcaccagtgtctgcccagatgcctgctgcagaaatctcagtgttattccggttattgtcacctccttccctgggcatcgtatccatcagtgcattccactggttgttacgtcttcagttgttcttgaatccacctactttctcaaactctacttctgccattctggtccaaaataccgtcctgtcttgcctggacaattgccaacagctcaacctgcatccattcttgctccttctaacctgttctcacgctgccagactcatcttttaaaaatacaaatctaatcatgtcctccccatggggtagttccttcccattgctcttaggataaggaccaagcgtctgaatgtggccttggcggggccaggcctcttcctgacccaccagccctgctctgcagccatgatgatcatctgggcatcaggactagggtttttactgtctgttttcatagattctgcttgtctttcttccctttgagatcttagcacagggtcattttcagggaagattgctccctacctctgccccttccgtgtgtattgcatatatatagaattttctgcatattgtggtgttttgacatcttaaaagacctttctggctaagaagagactgcggcttccagtgctagccagtccttagagctagcagggcccagctgggggtacccacctttgatatacaaagaaaccaacccagggctgcctcctttatctgacctgcccatccctgggagcagtattcctctgcctgaatcatctcagcgcctggtaacaggcaactccagaccgctcctataattaagagattgccaaaattattccaacgggccagtcctaaactgtgtaccctgccttgccctgccatggaaatctcaataaaggtctaggctctcctgtgactcctgtcttttgaatttatttatttctttcttttttcaagacagagtctcgctctgtcccccaggctagagtgcagtggtgcgatcttggctcactgcaacctctgtctcttgggttcaagtgattctcctgcctcagcctcccaagtagctgggattacaggtgcccgccactgtgcccagctaatttttatatttgtagtacagatggggtttcaccacgttggctaggctggtctcgaactcctgaccttgtgatccacctgccttggcctcccaaagtgctgggattagaggtgtcagccaccgcacctggcctgtctttcgatttttaatgcctgcatggtaatgtgtcataatgatgtacattattctacttaatttaggttactgtaaaaatgtttacgatgataaaaatgctgcaattagtattccttgtgtgtgcagaaatgcataatttcccaaagtgaaatgactgggtagtactttttagggcttaggtcctgattctctaataagtctccagaaaagttgtactaatccatgtatctatcagtagagtaagatggtgcctgcttccctgaaccctggccaactttggctattataaaatataaacatgcaagcaagtgtgtgtacagccatatctagatggaaatttaatgggtggaaatggtatttaattgtttcaatttgcatttctagtgcagattactcctgaacgtcaacagttttctgttagctgttggcattttctctttgtaaattatctgtggttctcagcatgattttctaaagggctgtttctcgttttcatatttacttataaaaccctctttctattaagcacattaacttagttttgtcatatatgcaaatatgagcttctgtggaaccctttcaaatgactagaaattcaagggggagtttaaagaaaaaaacacatgaaatgggatggtcaacttacattttattaataaaggcagcaggtttctctcttccttgaaaagttcgctatccagactgtgtgccaagaagcagatgtgtgaaagagagtctggactttgaagttagactggatttcagtcctagcagtgtcactctctagctgagggacctggggcaaattagcctctgcaagtctcagatgtcactcctgggtaacaagaatccctctggccttgtctggagaggtcagtagcttataggtagtgcatggtgcagaggtggtgttctgtaaatattcattccctttccgcatccctcaaagatgtgctgttctagacactcacacatctatgtattctgtttcaataaggaatgtacgtatttcactcggctgatagtcacaaatgaaatcattcattaatattttccaaataggtaaatatgataaatgtataaatgagaatagaaaacttcttagttaaccatgtgtatctgagtctaggagcaattttaattttcaagctcagggataatatcagcaaattaggatctgttttataaaagtggtagacaacgtaagatacggcattctggagaaaaatggaacaggcggcctcatatcctcaaaaatattttgattttaaacagctttaaacaaaatctcaaaatacttgcactctttcattgagaacttaggtcttaatctgttcttttttcccttctaggtgtggctggatctcctaaaacccattgtgaaacagattagaagtgagtatataccatatgtttaatagtgatgtgaaatctgaagccagacagtttcatgtctagacatctcttgccctgtggcatgaagcactagaaacacaaattcttctaccccataattgcttttcatcatcgactaatccgtgtactattaaaatgtgtgtcttctgcagttttaatgtgtaacagtttggtaatcaaaaccgagcttggaaaataaaatatcattttgattaacaactgaagcctgctattatcttaaaccccagaataattgagcttgtcttgtctatgccattgttcctttctgtcactttcgaagggaagaggtggagccatttattcataaaattgtttttaggtttttggtccttcctcttcaaagcctgtgaaatcagaatgcaggtattgtttgggaaaaagagtggccgaaagtgtgagtgtgtgtgtgtatgtggtgtgtgtgtgtgtgtgtgtgtgtttctgagtagcaagcagagccctgaagggaggctggcatgtatgcatttagactgtgtgttggaaagaaaagattaaggaatgtgtaggggaggaacaaagaaaaagaatgcttcctttttctctctcttcttgtgtcttcccctctctatgctttgagctaaaattcagcatcaagctctggtcccaatgtcatcccaaatggcccttcaatgtagtcagagtctggacaaaaatctgagaatactgtatccttttagttgagcatgaagcttacagtacctatgggatcatttgtatgtctgattaagaaaccccactgggccacttacagcaattgatgtggatgtaataaacacgcagcacaatttctgtgtggcccgtgtgcaattgaaattgatgttgatcatctacaatttcaattaagcagttacttataataattatactgacaatgaaatggccatcatttaatatttgctgggtgtcctgagcatggctggcaggcaacgactagtgttgggggcgaagagaagccccccagcctcatgggcccaggtagcatagagtctaggagatcgacatttgtcccccgcatgaagggaactgctaacagtggcaaggtatatctttggcgcagacctgaagacagagttgactctggttgggtcagagctggagcattactgtagttgtctcctccatatgctgtgacaggccatgtgtgacaaagctgtcacttggcattgagtgctagcatcttcctagtttcaagttttctaaggatctgagtagccgctcagtgaaaatcgcagagaataagtggtgcagccttctcgtcttcctcattttgctgctgttattttgtgctccagaattgacatgtaagagtttgttaattttaatgccttgtttttttctcccaattttgtacatattgtcaacatctttattgtatgtcatttttgctttttttaaacttgaatatgtgatcacagaaattataatacataattagtatttgtatatgatagtgaaaagtaaaacagacatttttctgcttttgtaataggacagttaaaatttagatttcattatagtaccttatatttcatagaacataaatgtattgctatcattccaaagggcagaccttttaagatggcttatattgtagcttacacatcaaaacaaaaaaactccaatgcaaatcacagatgatgatgatgatgatgatgatgatgatgatgatgattgagatggagtcttgctctctcacaccaggctggagtgcagtggcacgatctctgctcactgccatctccacttcctgggttcaaatgagtctcatgcctcagcctcctgagtagctgggattataggcgcccgccaccacgcctgactaatttttagtacagacagggttttgccatcttggccaggctggtttcaaactcctggccacagatgatccgcccacctcagcctcccaaattgctggcatgacaggtgtgagccaccgcgcctggccacagattattattttataatctgtctgtcctgttttctttctttttttttttttaaattctgaaaagttgttcatcttattcaatctctccctcccctcactccctatctacttcctgattttgtctaaactcattggtaagagggtttataagatactgataaaggccttggctggctgagacaaagccagggccacatctggtgtatgttttccccagagctcagaagagcacctagaggctgaaaacatatttgatgaacatattagcaactgtaccttataaatagttaaatataatgaattgcataactgatgtatgttttcattatttgggtaaaaccagccaattagatacatttttgaagacaaatgactttattttaaaaaacctagataaaatttaagtctgcagagaaaaaatttaatagctctatgtagtacttttgtcacagtattttttaaaaatggatctctctttccccacaatatggaagtgtgaattagtagctgaacttggccagttgttaagtgacttggaaaatggcagatgtgcacttggcagcttggaatgagatgcattatttgtatttgtaaagtctttttctttaatggcatttgaaacacaaatcagtaaatgctttacttctttttttcttcttctttagggccaaagcacgttgttgttaagtttgtggtgaaattctttccgcctgaccacacacaactccaagaagaactcacaaggttagtggtttggaaactgtgtattttttgctacagagtacagaggaaaagagaaaatgaatgttctcaattgatgacacaaacattttcataatgtttacttgaccagcatctgttctgtactgaacagtttaaccttcctctttcccagccctgcttacaaaaatggggggagaagtactgttttccctaaaacttggtttcttgaaggttgtgatatgaagtgaatcctgggcttatactctgttaatagcacattttccatcttatatgtcacatcatggactgttctggatgtgaatctcttctgtgaaaccaacatgtcaactcagagtttgtctttgccgctgccatgggtggtagatttggcaggaactggaggtcaattcttttcaaagtgtgaccgcgtggaagaagtgcaggcattgagtcagacctggcttcggccaccatcctgccacttgctgtgacgggccagttactttctccctttgtgttgccattacttcccctattacagtgtggactctaatgcttgcttggccagagtggttttgaggataagcagtattatactagagtagctgggatccagtagggacactgtaaatggtaactatcaacaccaccattgtcaccatcaccatcactgttttcattgtcgtcaccatcatcatcaccatcgtcattatcaccatcatcacatcatcacttctactcattttatatataccttttttttttttttgcaacagagtctctctctgtcgcccaggttggagtgcagtgacgcagtctcagctcactgcaacctctgcctcccggattcaagcgattctcctgcctcagcctcctgagtagctgggactacaggtgcccaccaccacacccagctaattttatatttttagtagagacagcatttcaccatgttggccagactggtctcgaactcctgacctcaagtgatccacctgcttcagcctcccaaaatgctgggattatgtgcgtgagccactgcgcccaacctcattttataatttgaggcaagactgatggtgttccaaaagagggcagagctggcaggaacatgtgtggataaaatgattccctttgaagagaatccttcagaggacactaatctaaccagcctaattcttttttttttttttttttatcattattatactttaagttttagggtacatgtgcacaatgtgcaggttagttacatatgtatacatgtgccatgctggtgtgctgcacccattaactcctcatttagcattaggtatatctcctaatgctatccctccccgctccccccaccccacaacagtccccagagtgtgatgttccccttcctgtgtccatgtgttctcattgttcagttcacacctatgagtgagaacatgtggtgtttggttttttgtccttgcgatagtttactgagaatgatgatttccagtttcatccatgtccctacaaaggacatgaactcatcattttttatggctgcatagtattccatggtgtatgtgtgccacattttcttaatccagtctatcattgttggacatttgggtttaaccagcctaattcttgtcatacatggtgttcaagcagtgactgtttaataccgaggccatcatatccttcctcatccctctcagtacagagcacagtatcttgggtcatcattgatcatcatttatcaaagggatgaagatactgatgtaatcagcaatatttattaagggttccctgtgtgcaagcattgttctaggcactgggagtgcagtgatgaaaagacaagaatactctcatggaaacagacaaagcgattaaataaacaagataatatcagatagcggcaagaactctttaggtaattgaagtaggaggatgtgatagaggtgcctgggtgatgacttcaggctggtgggtctgggatgcctcttgaggaagtgagaaggaaccatcagtcatttactgagagagctttctagagagatggagcagtcagtactctgcccaaggcgggaatcagctccaagcattcaaatacataaaggagggccagcatggcaggagtgttgggagcgtcgtggtgaggtgggagagaggcttgacacacatagtgttgaaagattggctgccatgtggatgttagggggagaaggagagtcccagggcatcctgtgaggaggcggtcacatggtgatggcaaagaagccaccaataggtagcagtagaaatggaggcaagtagttgtgtttggaacaggtaccggaagcagggtccctctgtcttggtgatgaggtggtggtggactttgagggagggagagggggcacttagatttttggcttgagtgactgggggggagatggtgttgggggttactaaaatgagaaaaggatggagggaagtggaggactgttggggagtggagagtcagggtgtttctggccaggtcatgtttgagatacctgttagctgtcccatgaccacagcagcagcaggaaggacatcagatacaggaatgtgcagctccagggagacagtgacaaagacttcccactgctttgtgttttctgaacgtttgtgctgctaatcatccacgtccacttagaaccctcaaatcagcgaagaaggcaaaggcagccaggaattggcagaaagcagcagccttctgggagctacctgcataggagggacagcccgagctgctaagccgggtctgcacaggactgagggctggctgatgacaggagggcctttcgctggggctgctgggtcttggtttctcaggctggttttcctgtcgttggaaactgcattgccctgagctctgcgtgctgaaataaatctaagggcaagtccagctgttggaggaatgtagttgtgtttggaataagtagcatcggtagcgtgccttttcctcatgtgaatcaccagggctctttcttgctcaggaagttggaggcacaaatcctgtatcccctcacccccgccccccgttttttttttttttttcattaaaaattctgttttgccaatagttttgcaccttttcaatttttgtgaatcgtctctagaggtttgcagttggctaccattctggcccttgctctgaaactccatacagctggttaccatcgagccgcatgtgcctggtacattgccagctcctctgtcagtgctgataaattcctaaagttacacgagctcagctggacggagcaggtttttgttgtttttgttttctggcacccagtgtgaactgacatttaagaagtcttttccaaggagacagttcttttggctcattgttgaataaaattgatctgaaattcctacttttttttttatcatctctccatcactccccacttggtacaaggcatagagaacctcatggggccgatgtgttgggactctcgcatctcaaattcctgtagaagcaaaaatggactgactattgagatttcaggtgctgttctttggcagatggtgaatgaggggatgctgggagaagctccatgtcagctgtgctttgtggggagggacgcatacacagaagtgggacagacggagaaactggcctgtggttcagcaaagcataagtgactctagctctgtagttaatgctttgggcctccaggaatagctctttcagcttcccattgatatagataggagattaaattgcactcttttgttaaacaagaagctggattcctttctatttattgaactgcaggtggaatgccatcctattgacagcagcacccagacacctagaaggagaagcgtattgactcctgggtgcagcctcaaaacaacgagtgagggtctttggaaaagatgatcccagtttttcttttttttttttttttttttttggcgatggagtctcgctctgtcgcccaggctggagtgcaatggcacgatcttggctcactgcaacctccgcctcgtaggttcaagcgattcttctgcatcagcctcccaagtagctgagactacaggcacgtgccaccacacccagctaatttttgtatttttagtagagacggggtttcaccatattggccaggctggtctcgaactcctgacctcatgatctgcctgtcttggcctcccaaagtgctggcattacaggcctgagtcgctgcaccctgccacatgatctcagtttttcttatcgtgtggcttggaatcactttccttgtgccatgtttagccaccctttgttcttccccttctctctgggcatcccgtcttcagttggatccagcttctacttgcctgtgttcttataggtgaggggaccctatcagaacatgctgctctgcgccctgcacgccctactgaagtgttctcttagactgcaggagaattctaaattgcttatatgtaataagaaaagagggaagatggtggttttccagatgaaataaattattcatattgaaagcaaggcatcaaatgggtgtgacatgtgactcttgcagtccctaggagtgaagtccctctgtctgctcctgccataatcgttgtcctctcctcacatgagaggtggactctcctcacgtccactcttctgctaaggaaacttgattccattttgagcgctttatgttttcattgtgtttaccggttcagttttatttagtgctcaccaagtaaaacttagcctctagctcgcgtgagactgattggaattgcttcagtggacagtactaaaggtgttgcagaatctctaaagttagcatcgcggccagcatgctcagcttacagctcatggtaagaaaagtggacagagttagtacccaggaagctacttctcatgttacaagggccttggatcaggaagagtccatgtaatcagggggagtcacgttcttccttcagccttcaaaatagccttgtgctctcccagtaaacgtgtgtgttttcagaacctgatgccatctcgcagcccatgtgtgattgtcaccaaaggtccccagagcctgccagactgcccatgcgtttgtccctgaaaacctctttgtgaacacagaaactcatgtttgaaatgataaatggtaaaatattcagaatgtaattttaaaacaggtaaaatattcagaatgtcattttaaaacatgaagccctcctatttaatgaaaaaccgattagaaatttgtagctctacaaagtgttgggctcaaaagacagtgactataatccagcacgatagtttgtattcccacctcccacatgaggtttagattgttttatattctctgcttttcttccctttgactttccagagacagacagacagacacacacacacacacacacacacacacacacacacacacacacacacagaaagggggttgcggggagagacagaagggtagagcaagagaacaagaataaaattagggaggtcagagaaagtcccactggtaggtctgtagtctgtagggcactttttgctggttatacaattgctgctgtggttttttagttcttaataataaaatttcctaaatgacttaaaatggattattcttttatttttaaaaactgccaacttttattgaatatttttgttctaatagtgttttccatgtatctcatttaattcttatggaaacctctatagctaatactattaaaggcccttttgaaaatcaaaaataccctttcattattataatagtagtaaacatacattgtagaaagttagaatagacaaatgaataagactaagaaagtagaaacattgcattcccattgcccgtcacattagtaagatatcctttctgaatttttctatgcatacatatgtacttttcatctcatctaatacattggccatattcacatttccctatttatcccctaactgtcctttgtatctgtttattctaaaataaggttggctaggcacagtggctcacatctgtaatcccagcactttgggaggctgaagcaggaggatgtcttgagcctagcagtttgagaccagcctgggcaacacagggagacctgtctctacaaaaaattttaaaaattagctgggcatggtggtgtgtacctgtaatcacagctactctggaggctgaggcaggaggattgcttgagcccccagaggttgaggctgcagtgagcagtgattgtaccactgcactccagcctggaaaacagagcaagactctgtctcaatcagtcaattaatcaatcaattaaaaaaaacagatccactctaggaccacatattgcatctagttagtatgtcatctgggcctatgtaagttagtccctcattttcttttcctcatgatagcatcttgttgaagaaactggaccagctacactacacagtatcctactttctgaatttgcctgctagctttcttgtggtgctgtttaacttgttcctctatcctttgtatttttccaaaactggaagtcatagtctgttctatgctgctataaaggaatacctgaggcagggtaatttataaagaaaaaaggtttattttgctcatgattctggatggctaaaaagttcaagattgggcattgacatctgctgagggcctcaggctgcttccactcgtggtagaaggcaaaggggagctggcatgtgcagagatcacatggtgggagaggaggtgggtggaacagggaggtgctaggctttttgtaacaaccagctctcacaggaagtaacagagtgagaactcactcacccccaagggaggttattagtctattcataagggatctgccttgacaacccaaacacctttcactgggccccacctccagcactcaggatgaaatctcaacatgaggtttggagaggacaggaaattcattctagggcttgactgatacacttaaacatttgggctggagtctgtcataagtgatgttgtgtgcttcatatttcattaatgattagagattgttcattggattcaggtggtgacattctgattattcttttgccaggtaaagtcatatttcctttgccctatgtgactgtccagtctcctacatggttttttcacccattgataatcctggctggagtcaataatttctttagagtttgtggaatgaggattttctaattctattattcttgctatgttataaattggcacttacaatttttttgccaaatacttgaggcaaaattttactttatgggagataaacctgtaaaacctttcttcaactacttggctgtcctgaaacaccctttcctctggccaggcaggttacacactcaattctttgccttgggttaccaattttaaataaggagatgctttgatctgcctggaatctaccatgtctccaaggccctatctctctatccttccaacaggtaattgttttttgttgtttttattgtttttgtttttgttttgagacggagtttcgctcctgtcacccaggctggagtgcagtggtgcaatctcggctcactgcaacctccacctcccggattcaagtgattcttctgcctcagcctcccgagtagctgggattacaggggcgcatcaccacacccggctaatttttatatttttagtagagacagggttttgccatgttgtccaggctggtcttaaactcctgacttcaggtgatccacccgcctcggcctcccaaagtgctgggagccacagcgtgcggccccaacaggtaattgtaagagggacagaatctgattgcaaagggtgctactgagaggacactgttctcaggcagcaggtaaactagatatctaaaaatctatgagtttgtatcattattttcacatccattttaacattgtacaggttcggtttggttttgtcttgctgcggggcagggggtggtatctatgaccttaagtatttatcctttgtgttacaaacaatccaattatactcttcattatttttaaagtatagtaaattattattgactgtagtcacccagttgtgctatcaaatattagatcttattcattctatctcatttttttggacccattaactatccccactccctctacctttaccagcctctggtaacttcattctgctctctctttccatgagttcaattgttttaatttttagctcccaaaaataagtgagaatatgtgaagtttgtttttctgtgcctggcttatttcacttaacataatgacctccagttccaatcatgctgtgcaaatgacaagatctccttgtttatggctgaatagtaatccactgtgtatacataccccattttctttgtccgttcatctgtggatggacacttaggtttcctccaaatcttggctgttgtgaatggtgctgcagtaaacatgggagtgcagatatctctttgacatactgttttcctttcttttcggtacacacctagtactgggattgctgggtcatatggtagctctatttttagttttttcaggaacctccaaactgttctctatcgtggttgtactaatttacattcccgccgatagtacttgagggttttttgtgttttttttttttttttttttgccacatccaagcatttgttactgcctatcttttggatatgagccattttaactggggtgagatgatatctcattataattttgattgcatttctctgatgatcagtgatgttgagcatcttttcataagcctgtttgctgttgcacagtttttacttaatgtctttgatttgcaaatgtattttttatcttacaccaaaaatgttgacatgcttaataccacaatataaagaaaagaaatgaatgggtgcagtgggtcatgcttgtgatcccagcactttgggaggccgaggtgggcagatcatgaggtcaagagatcgagaccatcctggccaacatggtgaaaccccgtctctactaaaaatacaaaaaattagctgggcgtggtggcgtgcacctgtagtcccagctactcgggaggctgaggcaggagaattgcttgaacaagggaggtggaggtttcagtgaggcgagatcacgccactgcactccagcctggcgacagagcgagactttgtctcaaaaaaaaaaaaaagaaaagaaaatgaatttttacaaatcttgtaactgggtcctatggaagtagttacaccacaaaaaaaaaaaaaaaaatgacgcccccttgtttttctcatttcattggcaatcctctgactcaccataataaactactgttattgtctgagccatagaaccatgttagagtatggatgactgattctgtgaaaaaaatgtaaatatttcctgtacgctacaaaaatatatagcatgctaggttatggtctcacatttttatggctctctctccctatgtaaaatgaaacatattattcatactgtgaaaagatgatagcatacatctctttgtattttggagggagatatttacactgcagtgaatggcagctggaatccgttccagcccatgcagacttcgtggttggggtttgcatccctctccttggcctctcatggtgaggccaggttcccggtgacctcctgccctctttgcctgacgcccagctctgttgatcttcgcaggtacctgttcgcgctgcaggtgaagcaggacttggctcaaggcaggttgacgtgtaatgacaccagcgcagctctcttgatttcacacattgtgcaatgtaagttctattggtttcctttgaaaatcatgttcaaaataacacagtgatctgattgatgggaaaaaaatcacatccaccaaaaaagaaagtgtcaatgtttttgtgttatttttgctgttcgtatgaaggcctacgggtggaagagaaaaacaatactcctgatgtcatttaatatgcatatccccaaatgttaactcttgtactttctgttcaggtgtttgtctttcttcaaggactagtacgcagttgatacttcagttgtcttaaaggataagcttggatggatggttgccaaatagactaaacttgttctgtcctgttcttggatttaaactttatcattgaatatggcatagtagccttaagacataatactgccaccgatttcacttctctctagagatttttgctcttcagaattcagtaaaccaagactcatgctggattaatggagctggaccctagatattttaatttgccttaatatagacaaaggatgaatcagattatgctcatctccaggcttgctgacaagccacctgggtgttttttccctcttgaccaaggcagaaattacttgaaataaaatatacacattatgtttcagaaaggtaattgtgggtataatacttaatgtataataagcactactataaaggaaagttgtgctatcatatcaccttttacatttccactgtatatgaattcgtctcatataatcagtcccctcctatcctgatatgtgcctagttcactagatttacaaaggtttataggaagtgtctctctcagtagtcaaaaagttgccttagtctgatacagtaaggtgtttcagatgatgtgtatcttcttgttttttgaatatgagcacttattagatagatgttttcttaccaatttgaaaaaaatgacatgggcaagaaaaaaacaaaaaaataggtatctttattaagcctgaccatgtgccagcactatatatatatatataatatatatataatatatacaatatataatctatatataatatatatataatatatacaatatataatctatatataatatatatataatatatacaatatataatctatatataatatatataatatatacaatatgtaatctatatataatatataatatatgtaatatgtaatctatatataatatatatataatatataatctatatataatatatatataatatataatctatatataatatatatataatatataatctatatataatatatataatatataatatatatataatatataatatataatctatctatatataatctatatataatctatatatataatctcatttaattctcctaacagccccttgagatcaagtctgtcattatccttattttacaggggaggaatccttagcacagaacttaatgtaatttttatctttcttgtgtttgttctcccctcttcataaaatgatagtggagagggagaggagggagaggaggctttgagtctggcagacctgatttctgttcgttggttggtgaccctggcagcttactaaccccccagcctccatttcttttggaacatgagaataatagaatccttttcataaggctgtaaaaattaaatggtagcatacacagttgtcctttaatgtccatggggtattggctgcaggacctcccaaggacaccaaaaactgaggatgctcacgtccctgatataaaatggtgtcgtatttgcatataacctacatatatcctcccatagactgtaaatcatctctaggttacttataataattaatccaatgtaaatgctatgtagttacattgtattattcagggaataatgacaagaaaaaatatcttagatgtttggtatagatgcagtattttttcctaagtattttcaatgcatggttggttgaatccatgaatatggaacccacagatagagagggccagctgtatacccagtacatgctaggtattcagtaaacattaatttcctttatccttattcacctgcaaccctccttttccaaacaacatgaaactttaaaatgaagcttccttattgaaatagtaacttcataaaatgtctctgacccttggcattttgtaagcagaagagaaattgatcttactcaaagattcctgatgccattgagtcgtgtacttctttcctcctatgtttttttctttaaaggtctgttacactaaagagtagattttggccaggcatggtggctcacgcctgtaatcccagcactttgggaggccgaggcgggcggatcacttgaggtcaggagttcgtgaccagcctggccaagatggtgaaaccttgtctctactaaaaatacaaaaattagctgggtgtggtggcggtgggcgcctgtagtcccagctacttgggaggctgagccaggagaatcacttgaaactgggagaaaccccactgccctccagcctgggcgacagagtgagactctgtctaaaaaaaaaaaaagaagaagagtggattttaagtgttctcaccacaaaaataaataaataaatatgggcagtaatacatatgttaattagcttaatttagccatttcacaatgtgtacatatatcaaaagatgatgttcactataaatatatcccccccaaaattttttttttagacagtctctgtcacccagattggagcgtagtctctcaatcatggctcactgcagcctcgacctcctggaatcaggcaatcctcctgcctcagcctcctgagtagctgggactctaggcacatgccatcaggtctagctaattttttcttttatttttttgtagagctgaggtctcactgtgttgcccaggccagtctcaaactcctgagctcaagtgatcttcccaccttggcctcacaaagtgctgggattataggcatgagccaccatgcctgaccaatatgtataatttttattttgtcaattaaaaaagtaaattaaaaaaaataaaggtctgttaacaatagtgaatttcacttgcatatctgggagtggagattcgctgacatccagaaaaccatggtctcagtccagtataccattttccccccagaaaccagcaagtggctcaaaatccccaaagaatcttcccttctcaaaaggcaaatagatgggatgagaagttcctctgctgtttacatggtatttgacatacagtcatgagacacataatattcttaaaatcttccgatatgtgtaaggccccatttctgcatttttaagtatcccatgcactcagtcatgaaaggaggcatttcatagagtcttctgtggattgtgtcgtgatttcaattattggtgattattggtaaggtataaggggtcaagtcatctccctttggcagaaactatattacccctaatggaaaattatctctggtaagctgatgttcatcttgtccgtctctatacacacaatctgctgtcgtcttattttcctcccttctttggcttgaatgcatagagtctttaagatagtctgtattttttcatttgttcctccgtcactggccttgcatcttccctgcagtattttgaacttaattttctctaatttattttggattgactaagaaggacaagctgatgaagagaagaatcagctactagttggccctgatgtaaagagcacacgtgggcagcatggaggcgaggcagggctgcgtttgtgcaggtcgtgtggtccttgctctgagggttccgcgtggtaaggcaggtttgtccacgcctgtcctctggggaagttgcatccatttattaaaatcacaggattttggtttgctgctgtttttcctattaattactttgctgagtagactgctaaggaatatagtatatgcataagctgatgtgacactttcagcataaaacatttaaaaaataggaagtcagctgggtgcggtggctcatgtctgtaatcccagcgctttgggagacccaggcaggaggatctctggaggccaggagttcaagaccagcctaggcaacatagtgagacctcgtctgtacaaaaacaaaattagcttgaggccaagagttcaagactagcctgggcaacatagtgagagcctgtctctactcaaaataaaaaaaaaaaatagccaggtgtggtggtatgtggcggtagccccaggtacttgggaagctgaggtgggagggtcacttgaaccctgaagtcaaggctgcagtgagccgtgatcgctccaccgcaccccagcctgagtgacagagcgagaccctgtcttggaaaaaataaaaggaagtcagattttgagtatgtgtctgttttcaaattccagaaatttaaggagcagcctatttccacatttcaaagaggagaaatgtggggagcgaatgagtttcatagtcatgtcactatggcgtgacaggagggcaagaaaagacaagcgacccagaagaaaagagaattagacgtctccaccctgatgccaaaggaaaaactggaccattcggctctctttatatggaatgatgggaaagagtgtgttctaagattcataggaattaagaagcccaaacataaagctcacaagacatttcggatttaaggaattcctccatagatagtcagggctcattattctcagattctgtctgaaaattcgcttatttacttgtaacccccaaatcaacactcatgcgctttcacggtcatttgtggatggcgaaaatttggagtcacctgatgtgcattcccagtggaggtcaaacgaggcaaagctctgccttctgttttttttttctcgtactgttaataagtatccttttcatggtctatttagtgccacgcttttcgcatttttgtgcatgtttttggtgatttcactgtttaaagcagtccccaggcgttgtgctgaagcgctgtctgtcttgtgtccccgcgtgcagtgctatctgcctgatagagcaaatgtgtgttaggtaagcatcgttcaggcatgagttcagctgctgttggccatgagctcaatgtgaagaaattggcaaagtatatttaagatggctttcaacagaaacacacataagatacggccagttaactaaaatgttgtttcaagactactctaggaacctcaccccgtatttcccctaggagaaatgattcaggaatggctaattcagtgtttatggtaaccttgtagatcataactgcctcgaataatgagcatcaactgcatttccttgagaaccagatagaaggaattgcagagaagccaggccctctattgtcaaggcaacatataacgatggcagtatgaccaggcgtgcccccatttctgtgccattttctgtgatggagcgtggcaattttactctatttaggaagggagaaatcagtccagaaaaggcaattaggaaatagtgttgttggtctttcggatgatgaggaagcgagggagggaggggttcttccagtgcaccggctgctgccaggtgagttggcatggctttgtgcagaacagatatcctcagtgggtgtgattgatggcaacatccaggccatgtcctgcttgattgctggagtgcattgccctaagtgtgacaagctgcttcatgtgacagaatgaaaggtgagtttcatagcaacagttcccttggtttttatcaaaacagctgggctctggtcattagactattttttatgaagcttgttatacagtatatgtgatacaaagaaaaaggtgtgctgtctcagaggtgtaacaattggtgtacattgaccttgaactagtgttgttaaggcgcaagtctgattttaaagctctatcctttaactttccacattccagcagtattgaggactgtcttgaggttatgtgagaatcatatttctcacagataaaaacgtgtaagactttgcaatctgatctgttatttctgacaagactacgaaaagtttaataaactcataatttttttaagcattagattatctacctttgcacccactgacgttcctcttttctctgcatgataaagcatttgcgttttgcactagtcattgctaatatataagagtttcactttgatgtttataaagtcctgaagttttagggctttttaggaggtcatacggttgtcacccacatgtgtagaatttactgccaagaacctccccaggcggatggggagaaaagaaaaaccgggagcaggtatggctgaagatggatgattctgaggcttttttttttgtaggggggcgggggggaacatggagtcttgctctgtcgcccaggctagagtgcagtggcacgatcttggctcactgcaacctccacctcccgggttcaagcagttctcctgcctcagcctcccaggtcgctgggattacaggtgcccgccaccgtacccagccaatttttgtatttttggtagagacgaggtttcgccatgttgcccaggctgatctcgaactcctgacctcaagtgatccacccgtcctggactcccaaagtgctgagattacaggcatgagctactgtgcctgaccttgaagcttctttctgactgatagagatgaggaggggagaaaactgtcttctcacatcaccacaattgataaatgtatcctggcatcccgtctctgagatctggcccttctgatgttccccaccaactgggctcaccttatgttgtctgctagcttctgtttggctcactggggaatattgacaaactgggaagtgtcattcctacgtgacctgtttttctttctgtttctttttagctgagattggggattttgatgaagccttggacagagagcacttagcaaaaaataaatacatacctcagcaagacgcactagaggacaaaatcgtggaatttcaccataaccacatgtaagtctcattcttggcttcatattccctctgagccggttctctctgcctccaacctacatgggtgtacatccctccaccccccacacaaactattgtggagaacaacacaaagcgtgaggaaagaagatcacagaggctcattgggatgtggtgattcatcctgggctctcagaagcacaggtcacccactgaagcctggagtttaaggatgcccatgctttggaacaaaagagaaagtaagagcaaaggaccatccagtcatcaagctaatgacaaattgggaaagggacgtggtcacctagggacaaggtcagagtatcgtgaaaatccagaaccttcatagcatctgcatttttgtttttgtttggattaatattttcaaaggactcatggtacttttggttgttgttttaaggaagcattggagcctgacggccatgtgaaaaagtgttctcttgaactttgcttgcaggtttaggttattgaaagcaactaaaatcttgttttaacccagtggtgttttgcttttatatgagcttaaaggaaactctttgagattccaaaaaaaacaaaaaaaacaaaaactggctgagtttggagacttttggggttttatgttccatgagcagtggaggttttgtcctagctgctagactttgggttacagtgaatgggagattgggtgtcatctgatcgggtagccccagtgtttgtgatgaaatgcctttgtatttcccaggagaagcttcttaatctcaaattaatagatacagggaattcaaatctcctggcctttctgtttaatttttgttttgtcagtggacaaacaccagcagaatcagatttccagctcctagagattgcccgtcggctagagatgtatggaatccggttgcacccggccaaggacagggaaggcacgaagatcaatctggccgttgccaacacgggaattctagtgtttcaggtgagagccttgagaacacggcctggttcccttggtgacagagagagaagagctggcccttcaactctgattcatattcagtgggctaagacctctgatggttatttttcggcgaacaaagaaaaattaacctcatctcaggctttctgtttcccaggccctcagctcccagattctatttcacttacctttgccctgtttggggaatccacattacagatttgtttggttttattgactttgtagcatcacagaaacatgtagctctccatggacctacacttagaacacagtctaatggaatcgagattttaggtccccgaataaacacctttttcacacttacagatgatactttgctgtaatgtgatcctttttttttttttttttttttcaaacacagtttggcttgagccagcttatttggtcgggacttcagatatacttaaagagtgttaggcacacttttaagatacagcagttttataaattcataaaagccacattcttgcaattttgtagcaaaacacatactgcacttgaattcttacttgtattctacttaaagacataatgattctctgcactctaaaatgtgtgctctattgatcattctgctattggactgtttcattgatcaatgcttctctcttagtagccttattgaagtattgttgacgtacaataaagtgcacacacttgaagtgcatagtttgataggtttttattatatatatgtatatcctgtaaaattccccacaaaaccaacagaatgaacgtattcatcacccccaaaaggctgttcagtacattccttttcaacacaagtgggtaacctgtgcttttagtttcaaagggatatagagaaagcacccgcctttctcatgaaataggatcagatttcacccagttaggaagttgtaaatatgttcaggacctaaaaccctttattgagctcttccaggtttgcttatatttcccccttatcttttatcaaaagagttccagtgattctctattcatgcaccagaagtttatgacagcataattattacaaatcacatcccaagaagagttaagttggcttcctgccaggtagtagggagtgacattgtgagagcagtgtggtattcaaggcggattttttcttgacagtttttgacctgcacgcatagcctctgagtatcggataagagaaacaataggccgggcgcggtcgctcacacctgtaatcccaacactttgggaggctgagacgggtggatcacctgaggtcaggagttcgagactagcctggtcaacatggtgaaaccccgtctctactaaaaatacaaaaattagctgggcatgatggcgtgtacctgtaatcccagctacttggaaggctgaggcaggagaatcgcttgaatttgggaagcagaggttgcagtgagccaagatcatacgactgccctccagcctgggtgacagagcaagactgtctcaaaaagaaaaacaataaagccaagtggagttttgagtactatcattaaatttcaaatcacaatcctgaaccatttctaaaaagtattaagaaggaaaagaagtgtctcacaattgaattaatgtgctttgattgtgtttgacacaatccctaagtattgggaatacctgggtaatgtagtcacgtgcaaagcctgtgtctcggaacccaccttcttgccagtgccctattgcttcattcttgccacgttaaatgaacaggcctggtgttccagtgggctccagaggaattctaatttcagctgagactgggcagatgggagttggtatccggcagctccccgttgtttctccaccttggatggagacaatgactccctggctgccaaagacaatgaagacatgtgaatccggcccagagactgtgctggccttgaagacacacagcaggcctggcctcccatcctcagttctaccggtgctgttggaagcttgatgggcccaggagccagaccagcgtggatgaagcagggagttgattgcaaacctgctgaatgttaaccatagctgccaggaaggcgtgtgcttggaagtctctttctgccacattaaacgtgtcatttgcagcaaattaaaataaatccacgttgcagtttccatgtgtataaaatgaaaatagtaagtccatcttgctgggttttatcatatcagggttgttaagatacagtatataaagccctcaggatggtacctggcgcttcctaagtcctggcagctaatgattgtggtggttgtcatggtttttatttctatttatctttcttttcatcattatcttggctagtttcttctctccctagaggcagacttagtttgtatgccaaaatcctataattagtgagaaataatgatccaggaacaggtatcatccgatagccacagatcctgtgagttctctgcaaaagtcatctctactgagcagtcgcctgccagccctcttcctttagctcccataagcaaaacagaccaactcccaagttgcttgttatgcatttcctggctcactgctactgtctttctttttagggtttcactaagatcaatgccttcaactgggccaaggtgcggaagctgagcttcaagaggaagcgctttctcatcaagctccggccagatgccaatgtaagtggtcctggcgggaaaggggacccgttgagccatgggatggcgtgtgtcctgcaaggggtggaggtctgcttggcagggcttctgctgaacctctggccagtgctacccaggtgcttttgtccacatgaacgccgagcgtctctaggacagatgtatccaaatggtcggtaactctacggctgtcatcgttggtaaacagagagcgtaaaggaggtacatgaacatgtacctggggagagggtcatttccctgcgcagattcaggcagcccctcctgataaacaacctgagctgtgctattgctgtgcatccagccccaggctacacctggagaccccattcagtatcctgccctaccccaggcatagactgacttccccaatccctgctggaggccctgagcccccagtggaactcattttcatgggctaattaggttcccttccccacttacttcccacaacacgcctaacactgtggcccacgccaggactgggacgggaagggaggagaagcctcttctttgtctgccagaaatggcgacggaggaggtgggtgatgtgtcctgggcgtctgtccccaaccagcgtgtagagttctttttcccatggcaaagaagatgataaatggcaattaggcttatagtgtagctacagtctgggttcagtaggttttcatggcccgacctgggaagcatatacccattttaaatggttttccatggaaaaattcactggagttccaaaaagctgccttatagataaagaactgcagcacagcttgtttgtaagttgggtccacccaaaactgtgagatcccccaaaatagttagaactgctgggaatgctaaggacagtagtaacttttgtttatataatatggccacttcaattgggagcagaaaatttctatatcccctttccagaatcaaagggcatgatttttttcagccaagagtgacactttgtgctccagaaaaaaaaattcatttcctgtgtagttcctggggtggcctggagcccggagccgtgggcgacttcacagagaaacgacgtaagagccaacattgacacgaagtatgaggaagaggatgaacgttgcgtttcagtgattttaaggaggcaggaagggactttcagtatctgggttttgtttttcaaggaaatgtaagccaaataaacataatttgtatatgaaatctgtcaaaaaatggtgtcacttccattgaagccacgtggctgtttctgttacccgtctaagagattctgtggggaagaaaatgatggactagggaccacatcttgtccttaagaataactagagtttagtaagtctttgcactgatggtcatgctataataaaatacacagcgaaaactttatcggacaaagctatcttctgccccttttctcctatttcagtggtgtatctatgggtaatggaaaaaaccaccgttgtattttccctttttagagtgcgtaccaggataccttggaattcctgatggccagtcgggatttctgcaagtccttctggaaaatctgtgttgaacatcatgccttctttagactttttgaagagcccaaaccaaagcccaagcccgtcctctttagccgggggtcatcatttcggttcaggtgaggtcgccactttgtgcctctgtttgctgggtgcacgtttttcctcccgcctctcacagccgctgtgacacacagcaggtcagggaggtgaacgctcattggcctccaggagctatggccaagcgggggcgcttgtatcttaatcccagtgggctctgtttgaacagcagaggcaccaggcaaagccacccagtcatggtaaacgcctagcgggagtctctaactcagaaaggatttctctctcagtagaagtacagtgtcttactaacatttggtgttgcttcatagaatatgtggacttggatgttattggtgaacttttccattcatttttaacaaatcattgtctgccatgtgtcaaatactgttccaggcactgagcccagtgatccctgccttcactaaaggcacaggctcttgggatggttgcttagtaaccaaacacagttatcaagtgggcttagttaattgaacattttttctgtatattcaaggaaaatatcaagagactgagtggacccaaaaatacagagtctgtcaggattgcttttagtcctggctagccaagcaaccctgcatctctcccagttagggaaggaggggaagtgaagccctgaagcatcatttgtgtgtttaaatgagaatgccttggtatttctccccttccctgttgtggtctctgtttcagtggtcggactcagaagcaggttctcgactatgttaaagaaggaggacataagaaggtgcagtttgaaaggtaagagaagcttcaatgctacttccagtctgagaaggctcagactcgccaggtaacagtttgttgctgctaaatatttctttacccagacttcagacttgatgtcccttgagttgtaaatgatagtctcagtcatcctcagcaagtccagtgttagagaggaaggttttagagcccaggggcacaccctcgagagtgagatgagaacagacagaaaggactaggggaggcgggagaggacatactggggaaggagagaagggcttaggacatcacagtgggggatgaagcatgataaaaactagctcactggtgagtccttcaatattttgggatttgtattgaaagcatgtctatgaacattttaattaaatcaagtaaatctggatgagcagaaacaggattttttctttctcaaaacagggtcttgctctgttgcccaggctggagtgcagtggtgtgatcacagcccactgcagcctcagcctctgggactcgatcaatcctcccacctcagcctcctgagtagctgggaccacaggtgcccaccaccactcccagctaaatttttgtagagatggggtctgcctatgttgccagggctggtctcaaactcctgggctcaagccatcttcccgccttggcctcccaaagtgctgggattacaggcaagagtcaccatgcccagccagaaacaggatttattattattattgttgttggtgttatcaaacacttgtagcccttagtgtgtgccaggctgttccgagcactgggcctgagtgaactcattgagtcttcacctcagctctgtgaggtcagtgctcttttattccctttataaagatggagatactgagtccccagtaggttaaataactagtccaggtctcatagctgctaagcagtttctggccagccagccagctcccaagcccaatgctccaaggaggagcagcagaacccaaggagggtaaaggagcggaggataggcctcaagaactagttactgcatgtagcgtttttaaaaaacttttttcattttcatacatttaaaaattacaataaagtacagggaagtcagcaaacacccagattcctactacttagaattaacggccattaacagttggacacatttgtttctggggttgttttttcttcttttatttgcagctctcgttacagacatggtaaaacccccttgaaccaccagctctggtaatttcccttctcccctccccagaggcagctgccacatttaggctcctttctgtatgcatattactgcatcccaaaagagtgtgtagaattgctctggaggccgggcacaatggcacatgcctgtaatcccagcactttgggatgccgaagtgggtggatcacttgagctcaggagtttgagaccagcctgggtaacatgacgaaagctcatctctacccaaaaaaaaaaaaaaaaaaaaaaaaaaattagctggatgtggtggtgcatgcctgtggtcccagctacttgggaggctgaggtaggacgattgcttgagcctgggaggtcaaggctgcagtgagccaagattgtgccactgccctccatctctgggccacagagcgagatcctgtcccaaaaaaaaaaaagagaaaaaagaaaaactgctctgagtgtgttcttttcattcatataagtactcccatatataattctgcatcttgcttttttaatactaccttttttttgagatctgttttaagggccatacagtagtatgaagatactacactgtatttctctgattgcctattgagaaccatccagattatttcagtattttgttttgattttgctgaaataaacctgcttctgtggccatccctgcatcttccttctaccacaaatctgtggtgctttctcatgccctgtctctataaatgtcatgttcaggaggtttttttcaggaggttttttttttggagatgaatcccataattttcctggacagtcaatggttagtatttgaaaaccatgtaagaaatagcccagttctctctctgattcagaatgtggatctctagagcttttctgtgctaacctggagtattttgaagaagagctggatgtgcctgggaatagaatctatatttacacagtctcatgaatttcaggacctgagcatttcagtgcctgtttgatggggaaaaggggaataggcagactgagagggaagagatgaaagagacgtgtcaagatgctgttaaagtcagttccttctactgttgagggcaggccttttcctctgaacttaccgctttgatagagtgagcggatgagtggtaattgcctctgttatagaactgatccagaaaataattacctaaagtacatgaattgatttcatattgtcagaccatagcttgctattcagagcatgggagggcgcagccacatcctccctcctctgtgactttccccttaactagaaaggtcctgctcagttgctaaatgtttcttcacgagctgcaccgtgagaactacaacaagggcttctgagaatttctccgagatttaagtaacccttgaaccatgcaagtgctatcaaaggatgactgcgtatgtttccaagtagcatttgtaaaggcggctctgggtaccatcattattgaggaaggcactaatacgtccaacaaaaggacttttgtttcatttaaaaccaaggaaaaagaaacaaaaacctcacctaactttaatgatcttgtgtgatttttcccaggaagcacagcaagattcattctatccggagccttgcttcacagcctacagaactgaattcggaagtgctggagcaggtcagtgatggcgctgtcctatgataactctgcttttccccacacttcctccacggagccctgggcttcagagcgggctttcttgttctctgtcctttcctttggggtttttagcagatgagaatctgattatgggccttggctttgaccagatataggctttgtgccatgtgccggcagcctgggctcagaggccgtggagtgtgttgtgttttcagctgccttctcatctcccatgcggtgctctaagccactgagaactcagctcagcggcggaaccatcgcggcagtgggcagagctgagactgactctccagctaaatgggtccacttgggaagagatggggacccgctttgtaaccaatgggtgtaactcctgcctggtgccaaggccagaagcctttgctggcacagaactggtcggcgagttcccagagcttgtattacagggcagtgaccacaattggcagtaagagacattatcactcttgctctgagggtggcaaaagctcgttttccctggagttggtctctgggtaagttctcagggctttctctaaaagagaaaaagaaacttggggaagaatataaaggaggtttcatcgtgtgaatccaaaaaaacccctttccccgtccaggctgccctgagaagtataagcaaacatgtcctttgtcgtttttctgatgactgtgtcaacttgccttcaggggtccctgatgtgcctgcccatccttccctggagaccccctgtgggctggaagggccgtcttgttccgtagaagctttacaagcccaacatgagcaggacgtggtggctggcgcctgtaatcccagcactttgggaggccaaggcgggaggatcacttggccccaggagttcaaagccagcctgggcaacgtagaccccagtctctataaaaaaatttaaaaattagccgggtgtggtggcacatgcctgtggtcctagccacttgggaggctgaggtgggaggattgcttgaccccaggagttcaagcgcagcctggacaacacagggagaccccatctctacaaaaaaaatttttttaattagccggacatggtggcgcaggactgtggtcccagctacttgggaggattgcttgagcccaagaggtcgaggccgctgtgagctgtggttgcagcactgcactccagcctaggtgacagagtaagatcctgtctccccctccaaaaaagaaaagcaaagcaaaccccagcatgagtcggcgggtcctggaaagcagagaccgggccgggcttgtgctgccgggaacagtgctgtcagccgccacgccctgaaggaaccttctggatcatgcccagatgtgcctccgtgattgctgctaggccagagagctccggggcagttctcccgccgcagaggcctcgggtgttcttgcctggctctccttttctgttttcagccttggaataacagtctccctcttctctatctctccgcacctttttccccaccccacccagtctcagcagagcaccagccttacatttggagaaggtgccgaatctccagggggccagagctgccggcgaggaaaggaaccgaaggtttccgccggggagccggggtcgcacccgagccctgcgccgaggagaagccccgcgggtaacaagcaggcggacggagccgcctcggcgcccacggaggaagaggaggaggtcgttaaggataggacccagcagagtaaacctcagcccccgcagccaagcacaggtccagcatcccgggctgccagaggcagcagtacttccattcctttcattgactgcagtgacgtagatagcgaatacgaccttcttagagaacaagcgtcccgatcccggtcccgatcccggtcccggtcccaaacaaatgacaattatgagggtgatctgaccagcggtgtctatctgctgtccagggaggaggggcgaagagaggctgggcgtagggcttccccgcactctgcgaagtcctcccggcctccttccggagaattccttgatgacgattcagcagacatcacctttgatatgagcgggagccctcgactcccaaggcatagctctctcatagatgaaatgttcaagggctcggctggtcacagccccctggccaccccattgtctcccagcagcagcagttcaagtccaaatatgagttgggacagaactgggtctcaaggctatgtttcggaaaatggacatgaccatagagaggggagtatgggagaagacactctcccggaccagggtcctccttatgaacgctggtcccccacctcgccaaggccatacatgcggaatcttcctggtagatgtaataagtcagagacagatccactcatccttagccaggtagcatttaccccggaggccatggatgggcttggtggccgtgggaagtgggggcaagccagcgcagctgctcccgagggtagaagcctggctaatggcacaccccccatgggtgcagcctctaaggtccctgctgtgcagtcggtgtgtgccagaggcatggcggggcagctggcacccctgcaagtgaccgagggctccaccagcagtgggactgagtccagtgagtcagactctgagatgctgatccccgggagtcagcccctcatatttggtaaccccgcagtgctgcgttccccgtccctgctgagaagccgggggtccttgggtggcctgcgtttgagtgaggaacaggaggaggatgagtgaggaacaggaggaggatgagtgaggaggccaggagccaagtcttcagcccgagcaacctggggtcacgagaccagggtttccctaaagatcatctgttctagtgactcattcatttgtagtctacatttgttagaggagattttggacaggcacatgtttgaaagagtctgcctgacttctaaaatcgttaagaaaaacaaaacttcacataagtggcttgctttccagaaaaggtgggcaagataaacagcaagtcctaatgacaagttctcaggagcttgtttattttgctggttgaaggctaggaagaaacactttattatgaatccgatcatgtgtatagtgtgttatatttatatggcaattttctgtgtatgttcaattatgcagctcaccctcctgttggttgagagtttgaactgaagcatccttgagattacagaaaagggtttcccattctccccttctttaaaaggagggctgctttgtccatgcctcatgaagtgaggaattggcactattcaaggccaaatgtaaattgatagctagttgagattatgttggtgaaatctttcgtcaagaataatgaatattttaatgggaagaatttggggttatttctgcttcccaggcttcctgtgaaatactagaaaagttgtcaaatcttcatgaattgtgatctactagggattgctggtttggtttaggtttgcattggtggatcatattgttatgttttaagaagtacaattctgcctctcagaatctcttggtgaaactgaaatcctattgagtgtggatgcagggaagagcaacaccttgaaataggcactgttgtcaccagtaggtcaacaaactaaatgcctgcctttgaattgtgtacagcgcagagaaggactgttttccagcatggttgctcttggttggtgtacagacacagtcttaccattcacactctggtgaacagtgtcctctgttgggaatagtgatacttggatgtttctctgagccagaaaaaagaaaatgtaaggagagagagattgacttctttttaaatcttgcccaccagtgtcactgcctttcacccagcattcctgcattttagattaaagagcctggttttcacttgaagtttctctgccttagctgcacgttgcaattttctgagatattttaaaaattagtgatgccgggaccctgaccctagggattttgatctcattggtcttgagtgctccttgggcttcccagctgtttgtactgggcagccagggtcacttcttacccaggctgtctcgaatctagtggaatacagtaaaagtgttagctaaatttttggcttgcttgcagagtaagaaaaacatcacaaacaaactgctttttcttgatgcctgtgatttgtacttttcagccttaggtacttttttttttgaaaaaaaaaaaaaaaaaaagataaattgtagaataaaatttttagatcctaagtaactacaaaattattgaaaagagtcctaacaaggatagctccctgatgtgccaccataccagggcctcactgggctcatcacgcgacccgatcacaagggaagcaccaggcgtgcttaggacactgagtagaatttggcagcagcatagaaaatggaggaggatcggctcgtctcattgacaaatgatatctgtccacatgaatgtccagaagtcggttttaaagagtctgaacacttaatccatttttatacagactttttttgttttgttttcctaatcatttgattcagtgcctgattgaatcaagctgattgttggatcgtttgagagttgttcattgaagtagtctatttacgccttgctttgaatttatatatttaaccagaatcacagaatttttaaactggaagggacctcagaggttcttctgggcaaaccttcatttcttctgaaaaagttaagtgactttgcataactaatacagctattgcatgacaaagctgaaactgtaacctcgtctctaggcttcacttttttaatctctgtgatatcttggtgcaataggagctttttgattcaatattttaattttggagagtcatatgaattaataattcaaatcggatgtggagactagtgatcaagtagacttaggcaattacaggccataataggtgggaagaactacttctttttatatggtgagggttttgcagttataacacatttttgcataatctgttcagacataggaaaaatgtcaatttgctatgagtgttcagtgaagtgtgagttaaacagagccaagtgtggaatcctgtggtttatctgtgaaagtggtttgttcaaatgaattttctttttccctctaattatacagcagtctggtaatgaaatacgattgagcactaggtatgaacttacacagcgtatgacaggaatcgtcaaatgtaagcatccccgagcaaaacacgcttcaatcattattttgttttgctttttcctacagcagtgatttttatctaagtattttaagagcagttgatcaatggcagtatactcagttgtgtattgatgagatttttcactttaagagttgctcatagagtttttccctcactggctttgtaccaggcaagcaacttaatttctgcttcttggccagtattcacaaaagcagcaatcctggtgtaattaatggtgcttacagtttgtttaaaggctgtttatcatacatcctgatgtgctgcgaatagtcactacttgcctcaagaggagcttgtcctatgctaataaagattctataacattggccaaagggtccgtttatacattctttgagcctggtggagcacgtttgctgaggtgatgtggtctcctcagtgtcactgtgaagagctcagtcaggaaaagccagcagcatctaccctgccaccctccaaaccttctgactttggggagactccagtcccccaggtctttacccagcctgcagatctcattctagcttaacaagggcatgcgtgtgcatgaagttgaactaagagtggaggaaggccagaggtagggttgggtgtgatactaggtagcagatattacagacttctgaatgcattcagatttccaaagggtttcctgagacctctcaaccaatctttctaggacaatagctagtgtaggggtctcctgactcaataggggacccaggccttcagataccagccactcactggctgctctgtgacgtgctatcttaagaccgtgaatggaagacaagccctatgtaaacacaaatcttaaagccactgttggctactcgagggcctccttgtgctaatatcttttgttggatattatttcaaaatatgtgaattttagacccttttgtggttgcctttgctgccgcttgttaagggcaaaataaaaacgcaagaaattcttttagcatgaagaaatacatttaatgagctccagaactcaaaataaatggcttcagctccttgaacagtcatctgtatgccattgacaatattttattagataggcgtttaattagaggaagtctgtgggccagattcttccctgcatgtgtgattcatatttggaaatttctgatttatctccccccaattgtgccatgtggcctgcacttaaaatgtaagtaattctgattttattctcaagaacttatttgaagattcaagccaagcaatgctgaaaaaagctaggcctgcaaaactaaaacatagcacgagcctctcaaaatttccaccaaatatacaaaatccagtctgctctgaatgtgcatcagaaactcaactttggttattagccctggaatttggtgccaaaaacaaaaatttggttttgttgtcaagcaatttctaaaggaagaaacaatgtaaatattaatctgtcattttaaatgttgttgaaactgccatgagtgtgcacacagctctctgtttcatacctgtaatcagtattcgcatgctttcagtccactgtttctacttaaagcattattccgtatttcagcacagaatgactttggtgaaactgtagctgttagtgagtaattgcgttacaggcagacccagtcttaaattaacaaatctgggttcccttaactatcaggtttatgttggttttatttgcttctatctggatcccttctctttgcctgggaccttattctgattagctagatttttaagagcttttaaagttacattccccagaaagactttttttctctggactttctcttttatggtctgtaaacatttctcctctgatggtcatggacttagttctaagactggccttcctctagtgtgatggtatgagtctattctattgctgctaaattttacaaattgaactgcagaagagtctttctaggtaatccctgtaacagagcaagtttctttgaaccctagccatgtatgtgtagtgttccattattggaacgctaagcatgtgggagttatttatatcttactgctcacggtcatcatcaaggtctgattacaaaaattcaaaaaattacaacctcaggcataaatttaaagaggtggccatttaaaaataatccgttgctaccatttccacttaaaatggtagctctctgatgagttttatattggctctctgttagccaagcccgtaagagcatatggagagaaaggtacgattgaatgaacttctgtgagcggcataaagacatttactctgacaacattaaagaatttactggtactgttttttttccttgttagtttaattccatctgtttctgtttaattgagtgaaacttaataaaaatggtgtctctagtgagcacatgtacacacctctcccagttgttgggatttaaaatgaagctgtgacttttaggccaaaattagcgtgacacttaatataacagttttctttctattaaaaaataatgacaaaacacacacacacacacacacacaatctgtatgatgatttggcctggagttgtagacatcacagatcaaaagtggcctggtgctagctgtttgggtatatccttgaaaagggcaactttgtcatttcctagagtaacctagagagagatttccaagcatttccccatgaacagaagtggtaaatgctgatttattgtgccatatgtgtgtttgggaggaggggagatagcgtcttgttttgaaaaaagttctcacttcataaaataaactgcacaccactccaaaaaaaaaaaaaaagatgaaacctcaagcaggaggaacttttttatttaacccctagtgaaagcaattaaacgtcttggtagatgctagggaagaattagaaaatcttcttttcctgaaagctttaaacattgaatagactctgatttattcaggatcatttcggtgtagattggccactcgacacagacatcacagcatggtagcctcgaaaccaagccttcagcatcttctcggcgcccggtgttggagtgttacttggagtggaggcagtgcatttgcatcttcatgtagtctccagatcaggttactctgatttgtcttggagtggctttctgtttgaaagtagggaagattaaaaatcaacttgccacgggatatctgatctccatgagtagttgaaagccagtctaaaaggttaactctacagggccggcgccgccagtgcggtcatggaaaatcgtgctgtgagatactggagtgtgctgctggggccaggtgcagcaattgcagaatgttgaggagtgaggagtagttagaaatcactgcaacatggaaaagcacacagaccaaggacgctaaggagggagcgaggactaccgggcaggtgtgcgtgtgtggagtaaaatgcatcggacagtgattgactccacttttgagtgagatgtggaggcggtagtggtgtgggggttgtgagggagtgagtctgctttattatgaatcaggattgatagctggccttaaagtgggaaatgatagaagggtcacttaggagcctgcagtggcatggtgaccagtctgttattactcatagatgaccttttctggctcttgaaaccaagctaacgactcctttttcttctgggcctcaaagtttctttgtaggaagtaaagcatttgtcactttccctgcagtgatttattgaaagactgaagataggtcttccttagttaaggacgcacactggctgctcgctccagaagcaccaagaatggctgatggataaatcccttacccatactcctgtttctgcctcctaaggttgctgtgaaaacctaactaaccaaacctcaccagcttggcctatattattaatcaaattcccttctgttctctctgtgtgtatatttaatactgtagataatatgttttatttaaaatttctaatacaccaaattaatttgaaatagaaaaggctggggacttcattctcatttttgtcatttgtttaatcagtttgggaaaacattttccgttgttccattgtatgcagtgtcttgtcagcatgtacctatctaggagaaaacgctttgttttcagcgttctgtctttaccctcaaagcatggtgtagcttctgttcttacactgttggagcactgtctgatgtctttttttttttttttaacactgctgaataccaatttgtacttggaatacctctttcctctagaatacagtgatcctattccccaaagtgcaagctttcatgtggaagcatcctaagtgatcgtcctgggtgatgccatatttcactaaagtgggaaaagaagaggtgaactttgctcttccaacaaggcttgcactttatactttgggcagtgcatgggagaaggggggcccttagaggtgagcaggatcactgtagctagaggagaggtctcactgaaacagaacgcatctgtgactgtagcttgcatggagagcctagacagccaaccatggatttgcctttatgttttgaatggaaacatctatttcaattgggatagaaacctttacctatgtcatatctgtaagagaatttagcttatagatatgtagatacgtgtgtgtgttgctgggtggggaagtgggtgggaatgtagaaaaggcctcacctgacttggtcccagttggcttctgatggccaaggagctgtttttcattttggtgggcacccaacatgtaggttctcacagatgctgtctggtttcttcttctctccatggcggaacaatgaagtacgtcaataaagcatggactcataccactgggaagaatgctggcttctccagtaacaatgagcttggtggttctttgagcatggaaggccaagctcatgtcacagtgtatgcacggtattaatatatctcttgttgatctaaactgaaggggcttttacttgtcctaacaggtatcatgctgtaaaaactgtccattgtaactgttctttcccactgatggctgaagctttgtcctgagtacaagatggtatttttcattggtacgaagcaccatgttcccaacccaaacactgcctccaccaccaccaccaccaccatcaccaccaccactgctactaccaacatcaccaccaccatcaccaccaccgtgttcaaacaaagcagcattctcctgtgtcttttcctcataagtaagaacaaggtagcacattcatttttccattagtgcatttcaattcttttcctgcaagttgcattgctattgcttttctgaattgcttgatgatgaactgtgaagctgatgcttagctgcttgtgaaacttttcttaaaggaactgggtctaagaagcacacatacattaccctcaacaacctcaggtatcaagaagaggaccacactgctaacatgggtaatcctataacctggcttttcttgtggaactttgtaatttctataaaataccgccagctttgcgtattccactgagccccaacttagatatcagacgctagtgagtcctgcctattcaggaagctacgtattattcagcataatactgcccttttttttgataactggctttcaaatgggataatctcaagagaggtttcattgtatcctcttagagcgtatggatttaaatagagcctttcaaaaaaatagatgaaaacctacatctctaatatatttcctacttgggccttttgagcatattctgggcacatagagagaaaatctcctatgttttagaacagaataaaagaagacaaattatggtagataagtggcacccagaagattgcaaaataaataattttatgtgggggaatattgaagaaaaagcatagaaacttttttataattgcactttaaaattttggaaaagaaaaattgagaatgcaatcagtagtctcatttttgtcagtattctgtcagatattagctattcaataagcatatcttggattactatttttttagttgtcagtttttctagtttccccctttataggaaaaaataatacctatgtggttaaaaactgagacccatttaaaaaacaggacaggtacagttaagtactagaaatgccgtttttatcacttgaaaaatagattagaaatgtttttcttttcccagaattgtgtgagtttgttttgaagccttgaataccggtacatggttaacaggcagcttgtgcccaatcccaaagcgggaagaaaggcctggctttggctcactgatgataaagtctcctcccactgcctttcagcagctctgccgaagagctgatcaagatgctgcaaacccagcttccccagaccggccaagagggaagaatgatgagcgtgttttaaattacaaagagagagcagcgcaggcagtttctggtctgggtgataaattgaaatccataaatatagcagtgctaatttgaagttccgtaattgtttgtgccatgagaatgtgtacatttgaaaggattttataaagcaattactagaaatgcctcccttgagagctgtatgactggaggtgttttcagtctgaggggggcagcataaacccaaacctcttctagatgaatggcagggtggcgggaggggtcatgaaatcatggggaagaggtgaaggatttgagagctactaacctgacatctaactgaatgcctaagaaattgcagggcaatttcaggaaataggaaaaataattttgaaaacattcaaagcctccagactttcggtgtgtgactgatcttttttctaatctctttaaacttctttccacctattgccttaatagcaggtgcttcctcttagggtccccccaaattatttacctcgagttccctaatgaaattactttgcattaatttgtcataaagggagaagtgctagaaataccgaggcattgataatttcatggagtagcaatgaatgtcagtcacagtttcctctccccgttgcccggggctgtgccttcaaagcaggtgacagactgcaaggtgtaaacaagctttataatgccatataaatcaaaccgggctcattttacctaacaacagaaccatgtttgtttgcttttttgtaaaatggactacttcagtgaaaaattgattccacgtagttctaataactctgtgaccttggacattggctttttatagacacagctcttcccacctgctggtatggacaccagtttgtacagactgttgtcacacaccctggctcaaagtcaaaagagaattttaattactcatcaagctgccaaattctactaattgcccccttgtcagcatatttcattaattgctgaaaggtaaatgagttacatattttgtttggaccacgtcacctgtacattttcaaagcctcggattgtttatcttgcaaagagagaaggggcctcttctccacagatgcagctcaaattagcaaaactgaactgtagagtttcaggcctttcccttccttaaaatgctgatagatttctagaccagactttgatatttattggcttcttggtcttgctgtttaaacacacccattgccctttctttcttaggccctataagcaaagctggagtagcgtcttgggaaaaggccaactgaccaccctaattttgtcgttccaagtctgcagagcgcacatattaagtagttgttactgacatctttaggctccgtgagtgaaatgcagcaagcctgcccccagcagcctgtgggctaatcctgagctgttccttcgtttaggtacacaggtgaccctgaagttcccactcggccctctgttttctgagtcctgtctcctctgtagcacagtggggattgttctgaaccgtggcacgccttcttggcgaggcaggctctcttatggaaccatagtctgttacctcatttcttccaactgctctgtcccctaaatgtgtgttcccaggtgcagtgcagcaagggtgctcgctgttggcctttgagagtggaggtggctgtatcggagtgtgctccccctactttttcccttgccccgagtggcagttcttttcctctctgttgccggatgctgtctagggcctgttagttgctatttccttgcctccgctccccttcccactagccttctaactaccttttattctcggctccaactctttcaatgatgaggtgaatgctttttctgttccacgtcactgcaaagtcaaggtgtccagcatgctctcacttataactgcctcacccgatctcacgcacagtgcgagagctgaaggtaagccccggatgttgccagattacggtggacaaataaaaaacaactctccaacagcaactcacaaatgcatgaaatgttttaacctctagacagactgccagaatttctctcttctaattcctacttgtagtgataacatttttctttttgtgatttttttttttttaaataatagtgtagtaccttgaaacaactgcagttctaactcattgtcaccatttctgtttgacacgttccacttcctttgcaattattgtatttagttgtgcactagtgtcaataaaattgacatttgtgaagcaatttctggcctttttctccggggttttctgggtctggtggtgtttcgggtgatggggtctttgtctaacacaaggcttcatgttagtgaggtatattaaaaaacatgaggatttaaaagcagagggattttaaaaatgcaagcttactgaatctgccttttcctcacattttctaatcttgctatccaaggatcattgcactaaccagtagtccgtgggcaggacgtctgccttttgtcattctccaggtacagtggatcttcctccactgtgttggcggtgctgctgactgctcaacctggcaccaagggtgggggctggtggtggtttctccagggttcatttatactgggaccaaattcaccgcccttacttcatcagctccattctaggtaggctgttgtatcttgtaattccaaaatgcacatgcatgactccagagggtgagaacagatgacaggaaaatgggggtgctcctagaaaaccgccctccaccttttcccttagagatcttcagcgtaccaagtagcagcgagcctgaaactgtagactgggaaattgagaaagcgctgactttgtctttccttatcatggtagtagacaggactgcaggttattttaactttgcttacctcatattagctctagcaaatctgctttattagtataaatataagtgttagacaaaaacacttaggttagaagtatattctgaaacatcccatgtagcttcattgggttgagatacagatatttgcaaaagtgtattggcaaagagtgtcctatacatatcatctcccttggctgactcatagcgggtaatatatactttttttttttttttttttttttgagacagagtctcactttgtcgcccaggctggagtgcagtggggcgatctcagttcaccgcaaccttacctacctggttcaagcaattcccctgcctcagcctcccaagtagctgggattgcaggcacccgccaccatgcccagctaatgtttttgtatttttggtagagacggggtttcatcatgttggctagactggtctcaaactcctgacctcaggcaatccgcctgcctcggcctcccaaagtgctgggattacaggcgcgagccactgcgcctggccacattttcatattactatggtatcctttctcaaggactcatggtaccctgtcacttttatcttataaagggaaattgtgataatataatgacgtctgcttttgcatgttgaagtgatcacatatgcctgtaatgtgatgctagtgtttctgtcccaaacagtgagagacatggaatgacatcaccaggtataacaagcttgcttctgttctttgtagaatggggagttagttgcttgacctttctgttagctgtgacccattgttacgggacgtagtgtgtcctaagtacagcagttgcttagatgcctgttagtatagttgtattttctaatcatttccccatgtctcattgtgacatagacactgtgtctttcttgagtaattcttagaagtaagcagtagttgggagatgaaattcctatttcgggatacactatgcttttaagctattttaattgctatctaagcagagttctctatcttatcattaattacgtaatgaggctccattgaatccttcatactttggtatctttattaaggcagctttgacttaggaaaaaaactagaaaataaagaatcgctttaggtttgccatggcggggtagtcaaatcttacgatttgaaaaaggtgaaagtagtgaatagaaatcaggtcccagaaaaaaattactttttttttctttaaaacttctcatccccaaacaggctccctgactggcagtcctcacctttccgagctgtctgtgaactcgcaggggggagtggcccctgccaacgtgaccttgtctcccaacctgagccccgacaccaagcaggcctctcccttgatcagcccgctgctgaatgaccaggcctgcccccggacggacgatgaggatgagggccggaggaaggtacagggccgagggctcaagcgcgtgtgtggctgtgtgtgcacgtgtgtttgtgtgaattttaaaaattgtactaaaatatacataagagcaaaggtaccatgtgagccattttcaagtgtacagcttgctggcattaagtacattcatgttgttgtgccactgtcccgaccatccatctccagaacttatcttcccaaacagaaactacatccatttgtcactaactcctccttccccctcctgccagccactggcacctcattctactttctgtctctatgaatttgcctactctaggtacctcatataagcagaatcacccagtatttgccattttgtgactggcttatttcacttagcattctgtcttcatggatcatccatatgtagcatgggtgagaattgcctgccatttgagggctgagtgatgtcccgctgtgtgtataaaccacactttgttatccattcttctgttaatggacagtcatgtggttcccaccttttggctgctgtgaacatgagtgtccaggtatttgtttgagtctctgctttgaagtctgttgtgtgtacacccagcagtggagtcaggtggactcctatgagaagtgggcaaaatggcggacaacaggcgacctccttgcacttattgtttaaagagaaagcaaggttgaatggccggcctcctccacggtggggctggctgcccacctgactgacagccgccaagggagttcaggccgatgatgccaccagctgatctcacccctgtccctttagacccagctaccatgtgttcccacaatgtaacttccatgtcatgaacaccaactccaccaacggacataggacgagacagttccttttttatgtatttcctttgcctaatttgagtccttttgctgacggtaatttttacctggaaggaaaccttcctagactatattctcatcatggaaatccattatcttagcctagctcctcacatgaaacggagagtaattcatatttattctcttaacacaaaaaggagaatacattcttatttattctcctaacccaaaaaggagaataagaattttatttcttgttgatgccagctaacaaaagatcacaagttagtaacatatcactttaatgaggacattctccgagacgcatactcaaaaatgattattgcgctttgtttcttttgctgggttttgcagagattcccaactgataaagcgtacttcatagctaaggaagtgtctaccaccgagcgaacatatctgaaggatctcgaagttatcacttcggtatgtgcagtatttccccaaaagcattcgattacatgatttatctcagctaatactcagctatacggggaggctggagctaattaaatgttggattcgctgacttcagttgaaaggattgtggtcctagggtatagaaattaaatgctaatagtatatttaattgggaatatatgctataacatttttgataatgatgattttcaagtgcaaaagaaggaagttcctaaggcagagaaaattaaaattaaacattttaccatctgtgtgcaccagtccagaacatgtcgtgttttgcccattgccaagtataactgctgatttttgttcacgggagacctcggaggtgaacaggagattcattttatctttgataataaattgagccttgtccgcaaaatctgccagaagaccgccttttattattttaatcagtcctgctcagtcttgaaaacaaattcagggcattgcagatgtcttcctgacccctggattctgggaaagcacaagccaattgggagggaaattgggatcactgagtttctgatcctctgggctgtggattgtgttaggcccttgacaggtgctcgctaagcgttgtgaacccagctcacctcagcgacaggagtgactttgtgtgaaggctgtggctttattcccaggtttggccaccttcatgcccagtgttttaacaaaggaacagagatggaagttcttaaaggaatgaagcacagaatattcagtggtcataaattagtggttatccagtgaatcggccagaatggaggttttgattcgagtagttccccatttaagagatttctcctggctttaacagtcaatgggtagcaaactgcagaaagcagtaatatacagatgggtgcttcttaccccgtctaaggaaagaaaggggaagcagtaaggcccgggcagccccgtgttcctgaaatgccaagaacctcgcaggaaagccctggctcctcccagtgcatttggctgcatgtgacttctggagaaaactgcagacactcgtcattgatctttccacccgtaagtgcatcgtcttcttctttccagtggtttcagagcacagtgagcaaagaggacgccatgccggaagcactgaaaagtctcatattcccgaattttgaacctttgcacaaatttcatactaattttctcaaggaaattgagcaacgacttgccctgtggtgagtacatttctacttcccagctacgttcctccctccgtcttgcttgtgttatttttatgtcgtccctgggtaggcagcaggcaggaacaaagatgaaaggcaggaaactggcttacaacaagtcagccttcaaatgattttcagttaaatcctacatgcgttcagatctcatttgcagtttctttcctctggtttgcagttcttcaagatggatttttttccctctcttatgatgattatatgattatcacaaaataaagacagtcgttacttctggaggggcaatagggattataaagagtaggggcttaggaaggctttgaggggtgctggtaatattttactggtgcttgctttaagtcttttatgaagtacatacatgccttgtgcagttttctgtattctattccagtgtttaaaacatgctttgaaaaagagatgtatgtggcgtgtgcatgcgcacacacacacttttaccttatcttgaattatcataaggatctgttttaatacatgaaatgccatttaaacaaagacatccaatgaataattaaaataatagaaatgacctaagtgtccatcaatagcagattggttaaaaattatcttaagcctgtccattaaataccaaatgaaacattaatgtgagagaagagggaggtacaaaaaaccaggaaaagctttatggactgtcacatgcagaatcctctacacctttacctaaaatagaaggttttgtagacaaatcctatggcagttttttaaagacaattatatggagagagacacatggggagttgattgtctactaaacatgcatttgaaaaatgccaggagaaaatagcaaaaagtttttggcagaaatagaacccgttatgggctgtatcctcactaccagtgagaatttggtttggagtggcctcaggggccctcagtgactgtagggcctgaaggagccctatgtgaggttgtcctgcctctggtgatcccagactgtggcattcaagcgtcggtttaacagctaagcagagctgctttctgtgttgtgaagccaatatgctggggcagcgggagttctctgatctccctaagtgatgtccggctttgtacattttttatacctggaggataattcatgtgcaattctccttcccttgagagagggaggtgacaggcattactgagaggccccagtggggagagcacagccagaattggagaaataataggtacaaagtcagcctcgctggaaatgggaaaaattgaaaatgccacgttagcaagagtcttggtattatgaatataagagaaatgtcacttttcaaaattaaaaataaaaatgtgggcacagtggctcatgcctgtaaatcccagcactttgggaggctgaggcaggaggatcacttgaggccaggagttcgagagcagcctgggcaacatagcaagaccccatctcaacaaaaaaacatttaattagccaggcatagtgatgcaaacatgtggtcccagctactggagaggctgaggcaggagaatcacttcaacccagaagttcagggctgcagtgagctatgactgtgccactgcactccagcctgggtgacagaacaagaccctgtctccaaaattaaaattaaaattctaccaaatgtaactttaccttccccaggttgacctagaacctttcacgtgtgttctgcctgtgtctcatcattcatacaaagttgaatgatgctctcataatggggtcaaagaccttacaactctggagaacccatttggcagtttgttctctggccagcgagacatgtgttagtaccgtcttaggcaaatcttcctggaggctcagggcatcttgagctgatgtcactatagcagtctcagtgcatgtggcagttgatttaaataaggttggagaggccacacacaggaaatgtcatcagtttgcagtaccctgaaagcccttcatggtggctttggctggctccccattggagggcgccaccagagagaaatgcagagagctgtctaatacgactcattttaggagtaaatgccgtacgcgtggatcttccatggccataaatctttaccttatctgtgaaagagtagtgagttgcttaaaaagcagttgatataatttgattcccagagggttttcagtagagtatctttctaagatccataatgtaacccatgttttacagaaagacatcagaagcatgtaaagttctcaaagctagagagaaagcagatagtcaacaagcagctccatcagtgggacctgcagtagcctttcaacaatagacctaaaccaaatacacgacactggtcagggatcattggaaggggctgcagtgaagttaagctaatcaattactcaagaacatgatgaggaggacctggtgtggcaggaattccaagggaaaaaggctgagtgtgaatgagtttagtatgagccatagaccaacacagagagaaaccagtgtctctctagatctgcacctctcagcatcggctcctcgttgaagttacctcaagcagcctgatataacccagccctgttatatcagagtctctgaggggtagaaccaatgcattcgtaggttctaaacttcccaggtgattccaaagtgtagccaaggtcaagaacatttgccctaaaatgcctcattaaaaagagcccagagcctagaaaaggatggctccttcaaaattcaaggttcggcactcctgcagagcactacaccacactcggctttcacgtgtcaaatgggatgagaatgcattccattaaaacaaaatgactggatgagaagagactttccaaagcatgatggctcccatcaggtacctgcagtctggtcctgtgggaaagggcatacgcatcttcttagtggaaccagaggacaaaattgaaacaatggagtgaatttccaaagaagcacaatgtctgaacacagaaaaggatttctgaagcctaagtgcagcgtggcagtgagagtctgccttgtgaggtcaggagctccttcatctcaggggtgctccagcagaaactgactgttcatgtccagacaggatttgtctgtggagcaaaaccccaaacctggcggtgcctcagggtcactgggcttgggaactggagggggctttgaaaaaggcagattgccaggccctatccagttctcttgaatcagagctttattaagagtgagactcaggaatctgtgtgttttaagtacttcttggggtgatcgtgatgaataccttttctgcaacaaccgaccctgcagtgcctctgacagtgctaacagtctatgattccttggtttgcatgccatagactggttataactcttgtttctttagtctacaagcaatgcatgaaggaatatattaatgaatgaatgagtgaatgaatgaatgaatgagtaggtgagtgtgtgcgtggcaggctttgcccatgggggacttgcactctcaaaggaggaggcaggcacatagggcacagagagccgtgtcctctcacaggtgtgggtgtcacatccagggtggtcatggagcgttgctgccagttctgtccctgaggacacacatgtaccatcattgcctatacagaacaggcaacccttgggctaaatctgttcagtgagaagaatggatcacagggaagattattaagaaaggattcaccctggctactgactgacagactgcgcatgtgtgtgttcagtgcatgtatgtgtacccatgcctttcctcacgttgccgtgatacggaagcgcaggttggctcctgtcgattgggatgggtaagatccgaattcgaggtcacacccccgccatggggctgtcttcagctgtaggtgtgggcctcgttgaaccgcatttcctcctgggtgaaatgtggatggcatctcccatgcagggtgttacgcaaatggcacagtgtctggaaggggcttagtatactgcgctgcgcagagaaagcggggaagctgatcattttttaaaaattaactttttatttggaaataattccagagaaaagttgccaagacaatagtgtttctgtatggtctgcacccatcctcttcccgttaacatcttatgtcaccataggagagtcggcaaaactaagaaaacaacgttggtatgttacattaactaaagtccagattttattccatggtaatattttcaatgattatcattaatggaaagagatctaaagtataatatgcagcaaaagttccccagaatttggtatataagtgatctagtgagtgtgaccttcccttcgcagtcctgcatgagactgcaatatacttccatcaacagtggggaaattacagggcagagaaagtctcaggaagttttccggaatgattaggctgaagctcagttcagcaaacacacctgcccctatccaaatgtcaccttctcctgagtaaacacacctgagaaggagatggacgcccaaggcctgcttcttgctggcaaagccacattacctgctttcttcaaaaacaaggaaactggtttggtgagttctaataacttcaggagttcttttccttgtgaaagcaagaacagtttactcagctgttcaaatgagttcagagaaagccacttaacaacctttggcgtgcagtcaggactcccaaatgccagccctgaggtgactggcagaggctgagtgcaaggtggccagctgggttccccgagacaggtggaaggcctgctttgctacagagtgccttggtagattctgcagggtacaaaactccacttacgagccagctgggagctgggagacagcaagcagtcagtcgtacaaagaggccctcggaattggctatggggtgcacgcagttttcatggaggatcagctgcatgttttaggagaaactttggccagagtcacgtggaaagcatgcgggagactggctgggaggaccagactgactgaatgtcgagatatcactgagcagccaaggctctgtgagacagtgaggaaggagaggggaggccacctagagttttgaacacagtcagctcagaggatggtcatgaaaatgggagggaagtcaaagaagccaggaagaaagaagcatacaagtacgataagggaagatgagcttgctttgggaatgataattttgagggccctgtgataaagtgctccaaacagttggaaatgtgggtcccaggctttggaaagaaatgaggcagaaaggtgtaggtttggaagttatccacaagaagaatcagatcttcaaggaagagaacattaagaggaaaagagagctgagggcagaatcttctcgactatacctttatggcagcttgctttccataaacgtagatcatggcagcataaaaaccagcaaaggaaacagaggccaccagaggtttgaaaaaaaaaaaaaaaaaaaaaaaaaaaaagaacacatgggggtggagggtccagaagatagccggtcttggagaatggcagccaggagggcaaggatggtttgaggaaggtagttcctggtgtacaggagcagactccgggcaggaggaagtcctgcaggggtaagagatgtgagaagggtgtcctgagggattggagatccctccagggcagagagggggctctttcagggatgggacactctcacagctgctgtcaggagtttcacagagggagcagcattgtgttgccgtgatgctaggtggctgaaatggagatgactaaggtcagaaaattgttttgctgcccagaaaaatggagcatctttatagaagcaccagtgagccatcatagaataaaaatgaattaaatacttttctcatcattctactagctctctgaagcttcaagtgtttgtgctaggtatcattaaaagaaaaatcagtgttcatagcagctttatccacagtagccaaaaggaagaggtaacccaaatgtccattgacatgagtggctaaacaaaatgtgtgatcgaatatccttttatttatttatgtttttattagttttttagagacaaagtctcgctctgttgcccaggctggaatgcagtggtatgatcatagataacttcagccttgaacttctggcttcaagcaatcctcccacctcagcttttcaaggtgctaggattatgggcatgagccatcacacttggccttgtttcctttttaagcatgagtaaaattacatgtttatttgtttgttttgttttgttttgttttttgttttttttttgagatggagtttccctctgtcacccaggatagaatgcagcagtgtgatcttggctcactgcaacctccgtctcccaggttcaagcaattctcctgcctcagcctccccagtagctgggattacaggcgtgcatcaccacacctggctaatttttgtatttttagtagagaaggggtttcgtcatgttggccaggctggtcttgaactcctgacctcaagtgatccacccgccttggcctcccagtgttgggattacaggcgttgagcttccacgcctggctagattccatgttcttgagcatagctttgagctagtttttcttggattttctgccttagtcgtgactatatagctcacagtgctttgagagcaagctgtttccctgagacgagtgaaaccgttttgccaattgccagaattgcaggtgggtttctactagaagacacttgagagaaagccctctccgggtcactagacgagtctgacacagctcttctcttctactgtattttaatatgtgccctgttgataacaggaatgataccggggctcacctggatgctatcaaacctgcctgtgaccgggttgtcactttggatcctcttattcaattcgacctggtggtaaacctcaggaaggcaagaaagaagctatagctttgagcaacctaagagtgtaattgacagacttgagggtggctgagaatgggagggcttctgtcttctgtgtttcccgcagctgccaaaggcgcggcgttcccggcccattgaagatgcctctcgcacaaatgtcatcttgacaagtgggcatgtgaattaatgctaagaccaatgggactttaatgaaaaatccacatatatcacatgtggctgatacatatgtcatacacaatatgttaggtcaggcacagtggctcacgcctataatcccagcactttgggaggccgaggtgggtggatcacctgaggtcaggagttcaagaccagccttgccaacatggtgaaaccccatctctactaaaaatagaaaaattagttgggcatggtggcaggcacctataatcccagctactcgggaggcagaggcaggagaatcacttgaacccaggaggcagaggttgcagtgagccaagattgcaccactgcactccagcctgggtgacagacgagactctgtctccaaaaaaaaatacacacacacacacacacacacacacacacacactctgttactctggctaatttgtttgcttttggaacccagccaccctccccacccgatatattaatgtaggatccgtctgttcccacttactcatttcacactatgcttttcacttacatagacacacaaacatacataatttcatacttttttccatttagaatcatagagactgcagggaatagtgaggacaatgatgtggtattggtgttgcaagtgaagactaagaggcttcaaaaaaagatctattttcggggtggagcaagcatctagagatagagcagggggacaaaaatgaaccctcaagctccaagctgcaccgctggcatgtgtgctctgaggagatggctcttcatgttgtggcaaggagagaaggggagagctgggtgatgagtaaacacacttgggtttacattgggcccatggggtatgcagtgtgccagtcactgccctctttcatggttaaggaatctcccggggcacttcaccacagcctggccaaatgttactgccttccagaaaacacgccctctcagagggagcccgcaccctagggctcgtgatgctttagaggacagttgggagattttattgccaccaaggtcaccagcacactgtgaactgtttatctgatgttctaaatgggctttatgttgaccctgaggttgggatggtgaataggagggcaaagtattgatttatcctggctggctttgcccctgcctgcgacgacagcccacaaaagtgtttcctggcagttggagacaaaactcgtcatacaggctgtccttctgcctcctcttaggggggtgatgggcagaatactcacagtccacccttggaggcaaccttgctgttggtcagccgcccacccacagttggtcattttcatgtcctttacttcttccctgtcctcagtctgctgctgaatgactgaccagctcacgttgtggtgaacgaagttttgatacgaggtcaggaagacttgaaaattcatgacgtgtgtgggtgtgtgttgcgtcctttgctgaggtgatgtgtagttgctcctgggagtaagttaatcacattgcacaggtcagaattgagcaaccaggcagcttcttagcagactttacatggttttcctaagtgaaattgtcaaaagaattttcatcttggttgctgtgtggtaattacccaggcaataaatatgtggccctgccttgcagacaaggacccctttcttgtgaggttaacatccagaggacgtggtggaagagttataattactttttcatgttcttgataatacagtgaccttttagccgttcataatagaaggaacactttggctttatacatttggaggcagtgacatgtagaggaaataaaaccatgaggatgtttctagatgggcagcaggaatttggattttgtccccggtccctggggctgtgtcctgtgtatttggacccaagcagggctgggacttgctatgtgagctggggtggggacaggatgggacgagaaagacagatgtgcttgtgtttgcagtgactttagaggcctccagcctgtactcaccacatcgcgtagagctgaccctctttacaattagggatttgcatcttccaactgcacagaggtctgatggtgccaacccagagccttctctaccatgaacgatgctggggacttagagagatacggatgtgggaaggaaggttcttttgactttgaagctttaacatcagtagataataaatagttggcaaaagaatagagaaagtgaaatagatgacatttggcttccatctcattccccaccgccctcgcccagcgtcctcttcccagcccttcattttctcttgggtaggggtgtgtctatgagagagaggatattgcttgttactgatggaagccagaatcctccccatttcttctcccgcaatccagactctcactagaatatctaaatgatgtcctctgaacttaagtcctttatttctgtatgttctcaaatggcagatccattcaaaaaattctggagccaattatttaagttccagataacaaggccaggcaatgtggctcatacctataatcccagcactttgagagactgaggcagatggatcgcttgagtccaggaattcaaggccagctttgacaaaatagtgagaccccatctttacaaaaacaaacaaattagctgggatgatggtgcacacctctagtggctactcaggaggctgaggcaggaagattgcttgagaccaggagttggaggctgcagtgagctatgatgataccaccacactccaccctgggtgacaaagcaagaccccatatctttaaaaaaaaaaaattttttttaagaaaatggaggaagaggatttggtgttggaaataagatcctaaaatctggaacattttgtgtttgagataggagatatggggtcattcacatggagtgctctggatggtctaagaaatgcattacctgggtcagccgtggtttggcatcatgaaccgaaaccacggcaaataggagggcttgtataggaagaagtagagggtgaaaagagaggacaaccaaaggattcccaaaacacacagatagcttgggagcagcctgaaggaggtggccacgagaattgaagggctggcctgaagattaatgagggagtctggagaggaaagcttcccgtagcagatgagcttggagggccacgcagtggggccgaccagcccggagagcccgaatataggaggaggggaggtgggctctggtggttcagaggttaacagctatcttcccagaaccttttcaggggagcagtggggagagattcgtttaattagcagaggagcggtgccaattaaagcagctaagagaacgcagaggactgaggatgctgtgttggtggaagagaatggaccaggttgaagaccaccagcacacagggcagcaacgaagacccaggaaggagcttggggagcctgggggtgctctcttttctttgattttagagaagctttaattacctaaaaggtttgggtgccctcagtctttcctgtgatgtaatttgcactatatgcttagttggaaccaatagaataaataatgctgttgattgcctggaatgtgaagccaggagcaacctgtttctactcacgatgacttttctacctcctgggtttgcttaattaagcgtgtgcatcctccttgccctcttctgttcgtcagaagatccttgatgtatcggagattgagtcaacagtcaggaaggctctgagtgtcccagtggaagccatttctcgcgttgccggagggttcttagccaccatatctgtggggtgtctattagtcagggttctctagagggacagagctaataggatagatgtatatatgagaggagtttatttaggagtattgactcacacgttcacaaggtgaggtcccacaataggctgtctgcaagctgaggagcaaggaggccagtctgagtcccaaagctgaagaacttggggtctgatgtttgagggcaggaagcatccagcacaggagaaagatgtaggctgggcagctaggccagtctagtctttccatgttcttctgcctacttttattctggccacgctggcagccgattaggttgtgcccacccagattgagggtgggtctgcctttcccactcaactgactcaaatgctaatctcttttggcaacaccatcacagacacacccaggattgatactttacatccttcaatccaatcaagttgacactcgatattaaccatcatagggtgtatgtagatcccgggtccctcctgacttcagttgccgggtatttttttccactttgaagatctctcacttcctattagaagcctagtgccagttttgtttgtttgtttgtttgtttgtttaattcgttcctttcatgtaagttggcttctggttttcctgaacagttggtttaaagataattgccaggttgattgttgaaaaccatgttttaattgtctctgggaaattcctttctcagtgatgggaaagtcagcagctatgcactggcacaacggttaggcgtgtggcctgggaaactagagctggctcctgtgcgagttcacacctcgtgataacagatatcagagaagttcgtggtttcttcatgcttctgtctccttcactataacatgagggtgatagtggtacctgcctcagacggtttctatgaggactaaaagggctcatgactataattaacttagcatggtgtctggtacatggacagtacttagtaaatactcactaccatccatgtttttatatttctctctgcgttgatccgttgaaaggtgtacgtgtaccccaaacctcactgaaagtgcccacagctttgctgtctagcacccaatatgtctgggggaccatggccctcccctccacgcctctctctcttcctgggccacacaccctaccctattctatggcatttacgtcactcccaccttaggtaccatctcctgtcctttctcagttatgcatttctcttcccaagggctatggacagctattggtctgcttcaggcaagggctcttagaagcagaaaccttcctctggggctgagtcttgcttcctgcaggtgtctagcagtacccatctctaggatggaatctgtttacaagctacttattgcaaatgatctctgtgctgacctaatgatgctaaaatcacccaagtgtggatggaaaaaaattaatctaaaatcaaactccagtgtgcagatgggtagagtaaaataattaaaccaaattaaaaggattggaaattggttctctcttgtctctttcaaagcataagtggaattctttgcaggatgagtggggtaatttccaagtctccttccaacgataacattccatgaccccataagaagttcaggagatgtccggggaggggtgattggaaaggaagcggtaggctgatatttgtaacccagggctgtcatgtcactactgatgctttgtatttccaaccctttgcttttgctctcagggaaggccgctcaaatgcccaaatcagagattaccaaagaatcggcgatgtcatgctgaagaacattcagggcatgaaggtgagctggttgagatttgggtggagcaaggttcaccaaggagaatcgagcggggctgccatgggcataggctgtaagccatttccatcagcatgcatcacctgatttgactctctacaccaagcttgtccaacccaccgccgagcagcagcttacagcccaggacggctttgaatgtggcccaacacaaattcataaactttcttaaaacattatgagattttctttttggtgattttggggttttttttttttctttgctcatcagctatcgttagtgttagtgtatttcatgtgtgacccaagacaattcttcttcttccaatgtggtccacggaagccaaaagattggacaccccggtctaatctaaggcacatcaggaagatggctgttcggcaaacccttctccaacctttctagataattttatttcaaagcatgaatgaaaagccaatcactttagcgaaagcatttttagtaggtttttttgtttcaaaagttttgcattatacccaaaacaagtgttttctgtgaatggatgattcaaaacttcaaaaaaaaaaaagatgtggacaaacactgtctgactgaacatttcattttcagtcagttgttttggtttcttctaataaccatgacaaaaatgttggattcagagctgtgtaggtatttcagtaaattctatgactttaaatcagtgtacgaggcaaatatagttttttttttttgtttggttggttttgttgttgttgttgtttttgagatggagttttgctcttgttgcccaggctggagtgcaatggcgcgatctcggctcactgcagcctccgcctcccaggttcaagccattctcctgcctcagcttcccaagtagctgggactacaggtgcgcaccaccacacccagctaatttttgtgtttttagtagatatggggtttatgttggccaggctgatctcaaactcctgacctcgggtgatctacccacctcagcctcccaaagtgctgggattataggcatgagccatcacccctggtcgcaaatatgtttttaatcatccagcaatatctacaatcaatgacataaaagtgaaagtatatccaaagaagtcaataaatattaaattaatactctaccacatttaaaaagtctgccccatctcttatatctgaaatcttcctttttttgttttcatttgaatccattaataattcctttaacataaaatgttttaattcacacagcgtctcttttgaatatacctgtactcacattttaaagcaatcttcctgaatcttaactgcccagagcctgtatgacaaccttaaaaactaataactgcccagagaagctagcaaccccttaaagaaggtgctcatactgcccccatttcaatccatccatccacctgtccatccacccagtgctaactgagcacctactatacacaagacactcatagaatgaaattaccattagggtttgtcttaattcccataatcctagctaagtgggttagcatttagttttttcccattaaaatgatgtatctcagccgggtgtggtggctcatgcctctgatcctagcaatttgggaggctaaggtgggaggattgctttgagcccagaagtttgagagcagcctagacaacatagcaagacttgtctctatgaaaaataaaaaaacattagctaagagtgatggtaagtgcctgtagttccagctactcagggggctgaggggagaggatcacttgagcccagcaggttgatgctgcagtgagccatgatcgcgccactgcactcaagcctgggcaacagagcaagaccctgtctcaaaaataaataataaataagcaaagatgaatctcgtgagggagagacaagaggaggatggtcggtgagtagcacagaaaagacaggatcaattgccactcaagggatttcctgtcaatctctcttaacaaagaccacggtaacattgactggatcctgaggtattgttttgttttttcactgtgttcaaacagcaaccctttgcaatttgaggcaataccagagagaggccgtggaagtgatcagggttgcagaatgctatgcaaaaaaagaaaagcaagaattacctaagatgttccatagccacagtattttgaatggcatgagctatggctgaggcacaacagatagaaggataacagacatcttttccactttccatgggagtttctgaagttaacgtattttatctttcaaagcaattttagctttacagaaaacttgaggagaaagtacagagttctcgtattcttccgtccacccctaaacacacagtttcccctgctattagcgttttgcattggcgtggtgctcgtgtggaaactgatgaaccaatactgacaaggttgaccattagggccccctcttggtggtgtacattctctgggtgttgacaaatatataatgacagggatccacagaacagtttccctgccctaaaacttccctgggctccacctattcatcccccttagatgccccccaaatccctggcaaccactgaccttttcccatctccatagttttatctttccagatgtcacatagctgggatcagacagtatgtagtcactgcagaccggcttcgtttgcttttcaaaaacgtcctttttcctctctcatgtaacaggacgctgtttctgttgttctctcccatcttttccctcgtttcacatgctctgtactttttccaaggccgttctggtttctcagcttttctccctgtgttcttcaatctgagatcacagctccccagggaggcgccctcttcaaggaggcttggactctggtgtgggcctttggggacagcagcagagacctgccaggttcatctccacccgcggggacagtccccagtgtggtgctgttcagcaagtgtccttcgtgccttctccaggttgtgtgccaactcccaccactgcttttcctcagaggctgacatcccaccctcccctaccctaacccagcgcagaagaccacctaaaaatacacctgatatccgctcctggcgttctttctcctcggtctggggagctggcatttctgcattcagccagcttcccctgctgtgctggcatctcaggagtgtgctgatgccatgagcgtttatagcatggagctctgtgcaagcaaaataaaaatagacggagaggttgctgagagtcactggcagcctttttgagaagttagttggggttttttttaattgctgtttttattgttttaaagaatttctataaagcatggaggggcacagcagaagtttccagaaatgtgagaagcccaggccagcactgttgtccaaatgcttagagtgttctcgagcctgcagtgtctttcccgcttcgctcccacccccgacccgtgcactcacctgctgtcatcagtctcagcctgattggctcttcccagactctgcacacaggagtgaggtcacacaaccaagggagggtagtccagggtctttaaccacctccacagagtcagagacacccaaatcaggatctccagcccacgctgtgaatgtccacttgcacacatccatccagacgcacaaaaacgcttggaaatcaatgcaaagaaagggcctttcatcctgaccttcacctgcttggcaagtggggaccttcattccttcctgtatcgcctgtctctccaagcttctaccacctgtacctctttctgacacttctaccactttgcttctcctggctctctgttttcttcctgctaggcgaccaggccagcttcccaatgagtcacctcccaccaacccagccttccaacccactacttatatgatggctggagtcactgttcatacaacacaaaactgacagcgcaaagccctcctggtttctctatggtttggagaatgcagtccaaactctaaacctagtgaagaaagcctctgctctagtcctaggctgtctctccagaccctgctcccaacccttcaccttccaccctgccttccggccaccgtcaactcatgtgtcctcccaagacctctgccttggcctgggtgtgtgcattgcttcgttggctctttggtatatacagggaagacctttggacacccactgtgtatgccaggcccccaaggatgtgacgacatgccaggatgttacaacatgatgatgccctctcaaaatcaaataggggaccacacgtgtgatagcatcgcacagagcgacacacacatgcacgcacatgcacgcacacacatgcaagagcgtgtataactggtgcaatctgaataagctctgtgggctgtaccaatgtcaatttcctggtgttgatattgtactctagttttgcaggatgtcaccattgagggaggctgggtgaggggtgcacaatccctccctgtatgtttctttgcaacttcctatgaatgtctatttcaaaacagaaagtcatgaaatcaacccagcagggaggctgtgtgataagggcggttgtggaaagacacagcagtgagtgcgggaggatgcaggagtacagagcagggcaggccccggagtaaccccgagggatggggggtcctcagcaggggtcactgtgtgcagagtctctgggtgcgagagtgtgccgcatttggatgcagggcggtcagtgggtggctcagggtgagtcgcaagcgtcaatgccagagaggtcagagggatcccggcttaaggggagtctgttgagtggcattgcagaaagttcattcaaggggctcaactcacagtgaagtggaaggggctggagaccacacagccagaatgagaacagtgaccatgggaaagaagacaagggcaggtcccacattttctggaggacaaattgataggacttggggacgggttcatacaaggaaagaatgtggagtgtaccccaggttttaatgtcgtgagtacctggctggtggtggtacccatcctgaagttagagaataaatgcgggggccccagctgaggcaggaggaagtgggcatgtgtctggacagctgtgtttccagctttttccggggcgtgggagtggagaagccactgaggttgggccatagcctggatgagaaatctagatctggtgccgcattttcctctctgacttgggctactcgcctgtgccagatactaccataggcttttctacaaaaacaagtcaattacaaaacctttcatcattttgtgccttttatatctatagacatgtatacaaatatacacccacatacatgatagaagaatctagatttcaggccgggcgtggtgcctcatgcctgtattcccagcactttggaaggccaaggtgggaggatcacttgaggccaggagtttgagaccaccagcctgggcaacatagtgagaccctgtctctaaaaataaataaataatttttttttaaattagctgggtgtggtggctcaagcctgcagtcccagctgctcgaggctgaggcaggaggatcccttgagcccaggagttcgaggctgcagtgagctgagattgcgccactgcactccagcctgggcaatagagcgagaccctgtcacaaaaaataaaaattcagatttgggagttaccagcacatagagagcaagcccactctgggaggtgattatcaagtgagacttgaagaaagcaaactcggtttttgtgtcctggggtgtcccctgtcctctgctctccccctatctgcctggaagtgtccttgccttgggagtcctccctcccacccaggtgaattcattcctcctttaatgctctgtcatccaagcgcttactctgtccccatccccaccatgactccaggagagtcagggcgctgtctgactctcatccatctccccagacctagcagaggaggggctcacatagctgcttagctactgtctgagcagacggggcgagggaagcagaactgtggttttaaaacgatgtaatgctcactgacggcccctgggctgtttgttatctgaagacatttagaagaaaaccacagccctccttaaggagctcctgttgatatatttgtccccagtttttccaggctcaattttaaaggaacatttatacctctgatgttatatacatagcttatatattttatgatccatgtgtattttaaactgctcagtaccttaataggcctttttatttcatcctgagaacttaagtgaaataacaaaaagagtgaactatgaacaatgtgaaatttaaggaaattaaacaaatcgtgaaatagagagtgcaggagcgcttcatttccccaagtgaaactgggcagaacacaggtgcatcccattcagctgaacaggaccctcctcctctgttgcctcccaagcacctggcggctcacctgtggaagcacagcgaggccttggaggccctggagaatggaatcaagagctcccggcggctggagaacttctgcagagactttgagctgcagaaggtgtgttacctaccgctcaacaccttcctcctgcggccactgcaccggctcatgcactacaagcaggtcctggagcggctgtgcaaacaccacccgccgagccacgccgacttcagggactgccgaggtgagtgctgggagcctgcgccacctggtgcccatgccacagttcaggccgggtgctcccagactgagcccagccagggaggggctccccggggagagaggtcagctgatgctgggtcccaggttttcatcagggtgggcgccggtttttattcctgctctggtgtttggttacatcttgattttttttttttttttttgagactgagtctcactctgtcgcccaggctggagtgcaatggtgcgatctcggctcactgcaacctccacctcccgggttcaagcgattctcctgcctcagcctctggagcagctaggattacaggcgcccgccaccacgcccggctaatttttgtatttttagtagagacggggtttcaccgtgttggtcaggctggtctcgaactcctgaccttgtgatccgcccgccttggcctcccaaagtgctgggattacaggcgtgagccacggtgcccggccacatcttgatctttccgtaaagaaggtgctgatgatcgtcaggacccctttcttcctttgcctcttgcatgcattttctcctttggttcctgggtggttttgtgcaaagatccctagagaagctccgcttacagttagcccccacccaggaagcttgcttctacccacgtgacggaaactcatccctctaccatggccacagaacatagcttgtaagaaatcctgttgctcattgctaccggtcatttgtaatgtgcccatcagcataatgagcatctctcctgtattaactcttcccaagcctcaggcacaggtgagttcatcttacatatggggactacggagactagagaggttaaggaacctgcccagagtcacacagcttggagggaaatgatttggaacctaaatctagaacccatggtcacaaccgtcctgcccttctatctcatggacagtcctacccgctcgtacttgctcagccccaggccaggtgctgtgtacctgatactgtaccaacgttcacaccattactcctttaaggacccctttagatcaattgcattatcccattttacagagcgtgacgctgagactcaggggaagggacttgctgggtcactcagaggtcagagccgcattccagacctgcttttcccacggggccacgcgtgctcttctgaacggaagtcgttgtgtctggtgtcacagttggtctgtgggtgtctgccctccctggcctagcatgcggagttggccctgcgtaggtggctcccgcacaggtggcccgaatccacacacccactaggagggcaaggcccttattccttgcctgaaatgtcagaaacacctcccaactctttagccaaaactgtcatcttttttaaaaatccatcttcttacaccttggcttaaaacctgggtgacggctgactgcctcaggctaaaatcggaagtcttcatgacctggcctggccagctctcacaccccagctgcgcagcgagcacctgtactgggcgtgtgagggagaaggaacagtgcggcccctgacctcacaggacccactggagggtctgcaggcaggtacctgggtgctggagggtctgcaggcaggtacctgggcagtggcaaccctgcactagggccgtgagagagaagtggacggtgcagttggagccggggcgttagggggtgttggggggatctcgaagggaaatggtgtctaagttcagaactaacatgtaaataggagttttcctgggtgaaaggagggtgtggagaatagagttagaaacagcacaagctcaggttcagaggggacagagaccggaacattgccaaaagcgtgcagggcacagggagagccacaaagtgaggctgcgacagaaagcagcggctacatcccactgcgccccatggaccccgcaaagccgtaacctaagagcagaggccgaacaggaagtgttttaaggagggaaacagtgataccaggcttgttctagaaaaaccgttgttaatatctagaatatatggcggactcctacaaattagttgttaaaaaaaggcaacccaataggtagaagacttggcaaagtaattgagacagtgacagttcacagaaggggaacacaggtgcctcctgacatggtttgtcattgaccatctgtctttaaaacaaaccatgctggccaggggtggtggctcacacctgtaatcccagcactttgggaggccaagatgggaggatcactggaggctgggagttcaagagcagcctgggcaacacagtgagaccttgtctctacaaaaaatttaaaaattacgagcatgcacctatagtgccggctactcaggaggctgaggtgggaggatcgcatgagcccaggagttggaggctgcagtgagctatgattgcaccacagcccaggcgacagacctagacccagtctctaaaaacaaaaccatgctgcctcttgcctccacaccttggtgcattccgttccttctgcttagagtcctggccaccacctccttggcctttcctggccagctctctctcgtcctttaagcctcagcttgtgcctggcacctgatgttgagctgacctcctgtccgccttgtcctgtcacactggcattgcctgtgtgttggccgagcccggaggaaaggacccagggcccctcctggctctgaggactcctcagatctgtcgcccatgggggtgagagcggtgtgtggttttgaaggcgctgttcttggcggactcatccagttccactctgctatttctctaaacagtacccaatggagataggctatccttgatgattgaggaagagagtgctagctagcttaaagcatgaagtggcagcactgtaggagcctaggtttccagagctagagggacactgaatgccaagggctgttcccagcacgcccctgcccctgagcaccgggggccggggtgccatcattccatcattttcctctcagagctccccactaccccccagccctgccactgagcactggatgccaagtaaatgtttattggaccaaactgggtggtcatgtctgaaaatcgagcaaggcctgggatttgtcactatggctgagaccgcattctctgataagcctgggagaatttaactcgcatccttgggggaaaaaacaagaaaactaaatgcttcccttccaacactgaaatgctgggggaaagcagtgaaagaggtatttagagttctgaagactgaagttcagtcaacaagtatttcttgcttttcttgaccaaactacccaagtgctcagccgctggggacttgagtgccacccaaacttgtcagccactggggacttgcgtgccacccaagcttgtattaatcaggcactagcttcttttaaatattggatgcccaccagtataggggagccgtgcctctatcgaaaaataaaggcctgatgtggtggctcatgcctgtaatcccagcactttgggcggccaaggcgtgtggatcgcctgaggtcaggagttcgagaccagcctaaccaacatggtgaaaccttgtctctactgaaaatacaaaattagccgggcgtggtggcacgcacctgtaatcccagctactcgggaggctgaggcaggacaatcacttgaacctgggggcagaggttgcagtgagctgagattatgccattgtactccagcctgggcaacaagagcaaaactctgtctcaaacaaataaaagaaaagaaaaaatttgaattctacagcaattcttcacaaccatcttggtaaacagtgtaatttccacacaagacagaactggggtgtggtggaatgttagttacctggaatatactgacacttcacaatatcaattacacctcctcccaaggaggtgctgactttgctccagatttttctatggcctctttgtgctcactgtgccttgttctttccgagtaacaggagggaaaagaaaagtctctacccagggacaaaattcaaggcagtcttcttcccccgtgtctttcccctctaagccaacaggtccgtctaattgaaggacagctgtatgccacgtcaccatgcaggggtcacttagttttaagatgctaaagtgaagcaaataaatacagaaaatacaccatcaatttttattatagagaaatagcactgtttttgctcaaaagacacctttgaatactgtgcagggactggagtgatttccctgcagcgttgagctgacagctgctaggggaagacccctgcctgcctttcccgctgcagactgtgtatgtctttccttcacagccgctttggcagagatcacggagatggtggcacagctccacggtacgatgatcaagatggagaatttccagaagctgcacgaactcaagaaagatttgattggcattgacaatcttgtggttccgggaagggtaagcagcagtggcctcactatgcactgcgcggggagcagaaaggaggcatcggagggacttacatttgaaccttttgaagagagacccttgcaaagcaaaatgtcctctttccatccacctgggagacaactggaaaaacacaacagtgtcgttagttcagaatcattgtgttcggaggagataaagcaatcctctgacctcatattctgctttttctccttacggggtgattcgcttctttaccttttcccctaccatatcccacagaagatttgagattgcttattttattttttttaaatgtacataaatgaaaatggaaaattaaaaaaaaaattaggtaaatagtaataaagccagaaaggtagtgcattaaattatgctagaaattcccatgcaggtatgaagtgtttttttaaaattcaatcttccatatataatttaatttgagttcaaaattaaaataccaaatcttagctggaaagcaattccaggagagatgcaagttcactgacactgtcgcctacccctccccagccccctgcctgagatgcaggtgattcctactcaacagggcttcccgcacacactccttccaggccagtgacaatgtggaggacaggaacaaagcctgccttctccacttcccttcctagaaagccatcatcacccaggaatcaaacgtatcattcagttgctgcgtctcatcaaatctctctctgggatctttaccctgtggcgcccccatttcaaatgctacgtcacccaggtcgagagacaactcactgtagctgctttgatctgctgctgcaggatccagtatctcaggggcttttagtctttttccaacaagcagctgccctggaaacttgacatctgtaactcagggcaggggaaggaagctctccttgttttggagcatttctgtcaggaagcctaattacagaactgaccagaagccacgttgtgagagattgtcagaagagccatgcggtaagcgctggcagaaattagagctgggatggcctcagctctgctggtgacaagatcctgccaggcctcggcacttaatgaccttatttacccatccacacggaaccctcagaaaagccctgtggaatcgatgtaattttctctcagctttgaaagttataaaatatttagcatctcatgctacatggtgaacagaccactgataaagaattcctttttttgaggaaatgttttccactgcaatggaaagaaccttggattggaggaggtggccctgggttcaaagtctcgctctaccagtgccggggtggcgggggaccatgcacatggagaccatggcctctccctcataggtcattaagatcaaatgagatttgctctgtgaaaatgacataatacatattaattatcttcgttttcccccacctacatttaattgaagagatgaaaggtagccatagaatagtggcattaactacattgcagagcacaacgggaagcattttgctctatcacacactggccgatcaggtgatgatgggcaagtttcttaatcatttgcccctcagtctccttatctgaaaaatgggaataatgatactgaaggtgcaggctcacgtctggagctcctgtaatcgctccgtgtcgcaggtgatcagtgattatctgaggctggtggtgcaggcggtaagaattatttacgaagacagttatagataaagaaaggcaggcttattcgagaagtaggaaaatacattgccagaaagcaacagcaagaaagcaacagcaagggaggagctgactgcaaggagacaaaggcttgctggggatttttaccgggtggtgtctgtgctgtgtgcccaggagggcttcgtgcagggtgataacgccgcggttgcagcgaactcacttgcgtttttctatcagccaaggctctggtgatagctgggcgcaggaagatggtgagttatctgtgcaggagggctgtgtcctggaccgtgaagaaaggcagacctgtatagcttctccgctttgtctttttgctttctctcggtcccaccagcctggctccttttcccttattaggactccacacttaggacaagccaggcgcatcccatgtgctccagagaggaggccattgttattagtaaaggtgaagatggaattggggtactccttcctaagctcagatgatcccctgattcttggcactcatcaggccgccacacatccactcattgtttcaaatcaaccctgagcagaatgggaaggtgggatcggaggcgcctgagggagcacgttctggaagtagatggtggcgatggtggggctaccttgtgagtccaccaaggccacacatgctcaagtgtttgtggattctaccacaatttaaaaatgatcatttttttgtttttaagtgcttgtgcccctgcgatccatgccctcaagagtgtacagccccggggaggatgtcactcgggaggcagaggtgccttggacacatctgcctctcactcctttatcctcaacgcagttactgctcattgagaagcagggttttcaatcatggagaagcttcctccagccacagtgctcccatgtggcctctcggtcctcaagggtcccttgctgccactttttatagcctctttcttctttgagaactgcttggggtccttctgatctccctcaccgtggggagccctggggatcctggggttacacacatggtcctcagagaggcccgggcactcttgaacccgaccgtccgtatcctttgttgggggagctgctggtggtacctgccctgtaccttcctggggaggagacagatgatccctagagagggtttagcacagcacctggggcagagcaatggtgcagtgaatcgcagctgagtgctgtaacttccaccatgcaagggacccaggtgggaggaagccagtaggtttgcacgctcgcagtccgttcttggggtctgcacgctcgcagtcagccctcaggggctacaaatttagccctcggggtctgcacactggccgtcagcccttggggtccgcacgctcgcagccagccctccggtctgtctcccctgcaggagttcatccgtctgggcagcctcagcaagctctcggggaaggggctccagcagcgcatgttcttcctggtgagtggagagagcggcttgtcctcacaaggattgtgtcacctgggcaagcaaggctcccaaggccggacctcggccacccaagtgagggacctggggtagaggaagagcagccagaggtgcccaggcccaagttgttgaggacagtgaaggcacagttgaggacagggaatgctggagggaagcctgctgtccaaacgtggtctcacctccacacacttctgattcctccagttcaacgacgtcctgctatacacgagccgggggctgacggcctccaatcagtttaaagtccacgggcagctcccgctctatggcatgacggtgagtacagcacaggctcgtggccagggcctgtcctcgggggcagcaggtgcgggcgctgctgacccggcgatgaggagggaaggagactggatagggagggagagggtggctagtggcatcttggttacaagacatgggctcaaagaccatcgaagaccatacaaccctttcacctaaaagctcgagccttctagggcttctctagtggggctctggggacacggctccttctcctgcacatgggatgtgcaggtccattccttatagaatcgagtgaaagggtaagctgacaaggccgcgtggcatgaactcgcctcccacagcctgtgcctggccccaggggccccgacagtcctcgccacacacaaggatgacagcgcccgctccctggagctgggccagccacctcgtcctcccccgagttggtttggggctgcctcctgtcccccttggcaggcaggtgtagagggcgcctgggcctgggatgtggccctttggctggtgcccacgctgtcctccgggattggagagagggaagtttgtgggctctgccaaaaacattcagtgtgccgcgatcttcctgtcgcctttccgatttgggtttttccaactcagagtgccttctccctctgtggggctctgggtctcctgagccctgctcaggggcacccctccttttccaagttgcctggctgccagctcagggatgtttggaagtgcatcacgtgcctcatggtgacgttatcttctcttgcccacagattgaggagagcgaagacgagtggggggtgccccactgcctgaccctccggggccagcggcagtccatcatcgtggccgccaggtaactcgggagcccgccccttgcctgtttcccctttgatgtgctgtggcctgaacacctgacgcgtctctgtctccagttctcggtccgagatggagaagtgggttgaggacatccagatggccattgacctggcggagaagagcagcagccccgcccctgagttcctggccagcagcccccctgacaacagtgagtgtggccagggcagctttcccatgcaggggtctggttcatggagggacagcatttctgcatctaaagccaccccatcgggtaggcctcacatccgtggtgtacatttgtgtttaaagccaaagatcaagacagttctttttcctaaaagtaaaacccctgaaatcggcatgagggagctgggaagtcaccttttctgggccggcatttacccttgtccagggagagaacatcaggctgtttacacacccgggaggggctggggctctgtgactggagctgcagggtccatcgaggcctcattagattctggttgggcaccacaggttgtgactgctgtgagccccccaaccttccagcacctcagagtgtatcaggaaggggcgctgggaggaaagatcagaagtgctgccttttgccccatcctgtagagtcccctgatgaagccaccgcggctgaccaggagtcagaggatgacctgagcgcctcgcgcacatcgctggagcgccaggccccgcaccgcggcaacacaatggtgcacgtgtgctggcaccgcaacaccagcgtctccatggtggacttcagcatcgcagtggaggtatgcaggggcagggcagctctggttcccagcttgtgctggcccaggcagaacccaggcaaacttctgggccaggggcttgagggaggctgggactgtgggtggccccacctacccgcggtggctgagcagggaaggatcaacactgggccccctttggagcctgccggaggtatccctgcaggggtgatgctgagtgggcgccgacctcccacaaatgcagtcatatcccttggtgctcatcagtcctattgccatccacaaggtcgttttctctctttcttcgcctgttttcttgcctctcatgcagttagcccagaacacagggcccagggcacagctgctggacagttccatggctgtcatgtcctgaaccgccccacgggaatctggtgcatgggagggaggagagtctgcacgatggcaagcaggtgccagctcctccccatcatgagggtcacggcagacactcctgtgacaaaagacaggctaacaagggaaaagcatgaccagtttatttcatcgtcattttacatgacatgggagccttcagaatgaagacccagaggtccggcgaaaaccgtctgtttttatgcttcgcttccgtgaagaacagggcgccgtggggagctgatgggacaggctgagagctagtgccaggagggcgaaaggagccccgcagggcccctccgggttttctgggcctttctgagcagcgttccttgctccggggtatggtgcgggaccctttctacagtgggggtcttagaacctcttctcacaccaggtgggccagggagtaagtttatagccagctcttacacagaacggtggagaaaggttagggtgaccgtttttggttttgtggctggctttgggggaaggaggttctggtttcaatgacccgccttaaggaagggggagtccagtttccgtggctcgcctggggaggaaaggggcgaggcaggaggtgggcagggaagcctggcttctgaacctttcacttcagggtattgttttctgagcccaccacctgaaagttggctttgaagatgcatctctcccagatcttgaatccttccagacccttccaaatgcccattccctaagcattcttcagtccaggcccatagctgtgtttcagaacacttcaagcccgtgaaggtgtgaaacaggaaagctttcttcatctctcactggcagtggaagctgccctgagctggggcgaggccattcatcattgtgattgtgttttatgtgaatgctcacgtttcaccgcagaatctctgcccccgcgccctctgcggggctgctgcagtcgaggcaggactcccttccaaacgcagaaagggccagttcccacacaggcctggtccaaagagtgtcacataagagactcaggccaggacaggagtttgctggctcttggaaccaacagcagcaggaatgagccagcagtgcttcatggagggtctcgagagagtctcggaatttattctcgggaaacgaccttccccgttgctcagacctgcctttattgagtttcctgctacaagccgcttgtttctaagcccaggcctgcttctgaagacatcctcaaggggacacatccgaggtgcaggccctggctcccccacgggcacagcctttcttcccagctgtccccacatacgaggctctgtcccatggggttcccctgagtgtgcaggtgtgaatattccctccccgggcctcctgacagcccaggtgtgaagagcactaaacattcttccccagcttcacacctccaccaggcctgtgcgcaaagcttgcgggtctgagacttctcccaggggatggggattatgatagcaggaaaggagacccccgaagcggaggagcagggaagaacccgtgataggctcatgggaaacgaggcctcatcagatctcacctgtgggcgtgtgtctgaaacgaagccagtcgatgtgtggcgccgccactggggaggaaccgtcttggccttgcttcgtcctgacctcagcaatgtgtgaattacgactctcaaggctggggtttgtcataggcctcaaagctttttacatacctggaggcacccaggccattcaacgaggcagcaaatacccaagtggggtccaggtggcccagagccacctgcagcccagcttttttggataacaaatctacacggtcgcagccttccgtgtgcatgatcaggtcaaggcactgagtcaggggcacgctggcccccagccagatctagccccggcctggtggcttacagcctgcgaaccaagaatgggtttcacttttttttaatggctgctacataatgtcttcagttttgccccttggcctgcaaagcctgaaatatctgccgtctgccttttgaggaaaagtttgctgaccctagtagagagcaggagagtgagccactggccagtggggtttgaaggtggcagtgaccacctagtacagtcagggacctgggctgctctatcactttgcagatgtccctccttgccagaaagccccctcccaaggcacgtggcatcaatcttgtgtcggtggcaggcagccctcatgtgccagacgccaaatgctcgctgactcgcagatgagccatccccagggcctcctccctgcatgacaggacaaagcagctccatctcctcctgactcaacagcctcctctccccagtcccgtgcccagcctctcccagttcccactcccgtctgactcgtgtaggcacacttgaggaaggggcgtatctggggaccgtgtggcctcactggcctctgctaaaagttgtgggcaagccggcaggcctgggggctcccactagaggtggggtcagatgttgggatggccagagggctgcccagcctgtgggcactagagccagtgaagggccagaggcaaagcaatgcaagttgtcttttaaggctggagtggcgagacgggacagcagggaagttgttcagcagacagagcgcagacaggactgggaggagggaagggacggggtgcagacaggaccggaaggagggaagggacagtgaggccagggagtggcgggcacgggggttatatttgttccccgtggcgtcactcggcaccaacctcagactgggtgaggccacagaaacatctcccacagtgcgggaagccggaagtccaaaatcaagctgctggcaggtgggttcctttgggaggccttgagggaaaatgtccccacctgacagcatctggtggctgcggcagtcttcttctcggggggtccccgactccacccatgttgcagggctccggtctgccgtgtcaccagctgtcctccctgtatctgcactctaatatcctcttctaaggacacggctcgtgctgggcttagggctcgtcctagtgaccttaccttgactcgatcgcatctgcagagaccctgtgtccatgtgaggtcaccattgtaggcacggagggtttggacttgttgggggtgcaattcaacccacagcagggtctgagggaatgggatccaagaagggagaggagcggtggccccaatgaagggccacgaggagacagggcaggctggtctggttctgaacaaggatgttgaccctctcgtgaaggcagtgaatggagacaggtctgggagccaccagcatggcctcggcctcctgagtgcagggcaggagactcatggcgcgcagggcccgtaacacgctggaggccaggatggacccgacacaggggagcgggaggctcggcccggccgtggggagcgaggaagggccgctggatgtgcctattgataaagaggtttccagaggctattggaatggccaggcagaagctagagagcgctaaggaagctgctttggaaacaaatgggcccagactgtgatgggtgacatgtatgaaccccactgtgggctggctgctgtgtgaaaattatgtgagtcagtatgaaaatacctaggaaaggggagtgtgccaccctccttgctccatgttgcgtgacccaagatgccgcatgggcatcagcccagccctggccaccaccaggaccttctgggaacctggagccttgcattttcttgttcctttctgccactgggggaggaggatggatggctggagctgcctgcctggcctggaatgccctttctccccgtctgcggggtcccccacatcctgcagcccctcacggacctactgtcagtgtccatgtctcccactggaccctccctgagcaactggagggcagggacatcagaccatttgatcccagctcccagcacagaagcttagtgccaggggcacccagagagatggaatgaggcagactcggaggtctgtattttttattgtggtaaaatagctataccacaatattggccaacttaacgatttttacgggaacaattcagtggcattaagtgcctttacaaggtggtgcaactgctttgagtctctgctggtgatgtcactttggcaaagggacgaaatgagccaccagtgcgtcaggcctgctcagagttgtttggaggtagcatggacacaggtgcctgtccctgccccctagctgggctgcagcgcatcctaacaatgctccaggggctgggccggccctgagcctggaggtgggcagggctgcaactgcctcctgggccactagagggcatgtgggagccactcacatgcaccccaggccccacttcctgggtagggtgcctggcccctcaaaacgagtgctgctctgagcttgttgggatggatctttccctccttcagcttccgcctgctggcaatgcatggggtcctgcgcccccatttctgcctcggtgtcacagggcacacccctctcccctcaaggtggctcttctcctcaggacaccactcccgttggatttagggcccaccctaccccagtgtgatctcgtcttcactagttaccctgcaacgagcctatttccaaataagcctgtgttctaaggtactggtagtcaggacctcaacgtgtcttttggggggacacagggaccccaagatgccccacagcaagtgacaaggggaagtgatgagatcagggtcccaggacctgccaagtctccccacacacgggggagcgggggtggggcccacatccttcagtcacggacatgccccagcccagggccctggtgcagggagagctgctctctgtgccctcctggggcaggtgcccgctgtgcttctcacaggcctccttgcctttcagaatcagttgtctggaaacctgctgaggaaattcaaaaacagcaacgggtggcagaagctgtgggtggtgttcacaaacttctgcctgttcttctacaaatcacaccaggtaagtgtctcgcacagggcaggtggccctgggaccttgggggtggcagcatgaggtgagggggccgccctcctctggaatgactcaggcctcttgggctccaggtgtcacggggatgacagggatgctggcggggggccctgtccacccgaggccctcaactctagggaagactgacattatcatccactgaaggacaacttctgccctaggaagggccacctgtcttctgcctggacaagggacgggggttggctttatctacagctcagtcctggcgggacttgccacccgggccatcacgtacaggcaaacactggctgccatggtcccttccaggcccacgcccgaggagggagctgcctgggctcccaagtccctgtctgatgcggggcagcagccaggcccagcagcagaagctgaccccgaaaagccactttgctttgtttcccctttccaggacaatcatccccttgccagcctgcctctgctcggctactcgctcaccatcccctctgagtccgagaacatccagaaagactacgtgttcaagctgcacttcaagtcccacgtctactacttcagggcggaaagcgagtacacgttcgaaaggtagacacccccttcccacgcacagggccctgcagaagaggaccccctcttccaaacatcaggatttctcccaagtcagcgagtgagatggccccacccttccctgccaactaagcgtttagacctggggtcccactgcccgacaccagcaggcgattctgttctcatggcagaaagtggggtcccaacttccctgcgcccttaccctgcacggtgttggctgaggccctagacatcttgcttggagatctctgacataacgtgtccgggatgatgaagctaagccccagtgagactgcctacatggtgtaatggcagggactgcagacttcatttagccaagaaagaaatgcaacagtcaggcctaagactgttcctgcaattcatattttgaatagagatcctgggcctctgcaaattgcatccccaagccgactacttgtgcagtttgccctgctgagccctcctcgccccgggaggcagaaggggaggggtcctcagcaatatgctgagcacctcctaaacaacatcacctgaaaaaggaacctagaggagagccattctcaaatctgatcctggactgagctcgagagctgggttgagagctgggttgatcaaagttgggattttgctattattgtgacaaagggtccagccttgcagtccagatcctgaaaggcctgggacaaggccaggtaatttggggagtccgtcctgcattgtgcaggatgttcagcggcatccctggccacccactagatgcccgcagcaacccctcagttgggacatctaaaaatgtctccagactttaccaaatgggacagcattgcacccatttgagaagcaccggtagagagcaaatacacaaatatataaaaagggagatttgggcgtggtggtgcaagcctgtagtcccatctcctgggaggccaaggctggaggatcgattgagcccaggaggtagctacagtgggcgataactgcaccactgaactccagtatgagtgacagagccagaccctgtctcaaaaaaaaaagaaaaagaaaaaaggaagggagagcttccactaagcaggatgggacacgtcccgccattctctgccatgtccatgaaaataggaggtagcgttctccccagcaaccagaggccacctcgctcctaactgctccaatggagcgggcagtgtcactgcagcaaggtacttccagctccacactgagtgagtgcccaggccagtgggtctccactgtacctcaggaacgcctgggtgctggctgttcccttgctcttctgctgaagtggcagattaccaaccaggcggcctgacttcaccttgtgtttctgtaagcgatgcccaccaaagtgtcaggagtccgtccaaacaaaaggttgactaactggcgttcccgtgttgcaggtggatggaagtgatccgcagtgccaccagctctgcctcgcgaccccacgtgttgagtcacaaagagtctcttgtgtattgatggccggacacactcgtttccgcagtggctgctttcctggaagacgtttcctttcttctgtattaatgaagcctggtaaaattaacacctgtctgaaaatcaaaaacatggcttcccagcagctctcctgtctccacagccgcgttttttaaccccgacctctcagcgtctgaatgaacagcgctcccacctccagtcctggcatccgctgggggcgctgttctttagctagtgccagtattaaaacattgtcattacgagagtgccaaatgacatcttccctccaccctgcccctgaaaaacagtacacacacatccgttcaacacaagacagggcaagtgtttttcttcctaaaaaaagttctttcttttattattttcacctattggctgctgcattttacgaagtggacttcccggtgtttgtttgtttgtttgcaatacactcagtgcagccttaagcaaatgagatcattttcagatttcattttttttttcagtctttctacttttgtaataataggaagttagtaggactcacttctctgattaataagcaatttgcagcacacagcgttccactgcggggtttcacgctcacctgaaaacacctgttcccaacctacttcttggtgcaagttgaccaaatcgttttaagtggtaactctttccaaccgtagcagggttgttttctgttaagcaaagccgagatccagtgcaatacctggactgtcaccgtcctgtgagtggtgtacacaatgggaagataataagccgtggtgttttgctgtctgtctgtgtcacaagcatgaaaacccgtgtgtcattgatcagcaccatttgtggtatgttccgtgatgagcgtttagtgagcctgctggctgcagagcactatgaaatcatggtacgtagtccccggcacctgtcgttattcctatatcctcctgcaactgtggtttgaaactgcgcattctctagtagtatatatcgtgcctgtcttcaaaaacatttccctttttatactcattccccccaggcatggggtagtgtcagtcggactgcacagggaacacggtttccagtggctttggcccctactcgggaaacgtctgcctgttctcgatggtgatggggtggctgccattcccttggttttcctaagccctttctaacgagagtctcaaacaagcggaggcgagggccaattcaaccccattctttccagcgccccgcaccatagcacctgcccacctgagaaccaggaacgcaccctctctgtggagctctgactggtgtagctggaaacaaacagcaacttgcaaacggacgaagagcctgccgtgtgttaatcatttgccttacaagatgtaccagacggtttccagtactaacaaagggaataaaaatacctcacgccacaatccagcatattgatgttttaaggcaaaacaa

SEQ ID NO: 269 - DNA, 4817 bp, Homo sapiens
cacccagaggctgatgctcaccatggggcgcctgcaactggttgtgttgggcctcacctgctgctgggcagtggcgagtgccgcgaaggtaagagcccagcagaggggcaggtcctgctgctctctcgctcaatcagatctggaaacttcgggccaggctgagaaagagcccagcacagccccgcagcagatcccgggcactcacgctcatttctatggggacaggtgccaggtagaacgcaggatgcccaattccatttgaatttcagataaactgccaagaactgctgtgtaagtatgtcccatgcaatatttgaaacaaatttctatgggccgggcgcagtggctcacacctgcaatcccaccagtttgggaggccgaggtgggtggatcacttgaggtcaggagttggagaccagcctggccaacatggtgaaaccccgtctctactaaaaatacaaatattaatcgggcgtggtggtgggtgcctgtaatcccagctactcgggaggctgaggcaggagaaccgcttgaagctgggaggtggagattgcggtgagctgagatcacgctactgcactccagcctgggtgacagggcgagactctgtctcaaaaaatagaaaaagaaaaaaatgaaacatactaaaaaacaattcactgtttacctgaaattcaaatgtaactgggcctcttgaatttacatttgctaatcctggtgattccacctaccaacctctctgttgttcccattttacagaaggggaaacgggcccaggggcagggagtgtggagagcaggcagacggctggagagaagcaggcaggcagtttgcccagcatggcacagctgctgcctcctattcctgtgcaggaagctgaaagccgagctactccacacccgggtccgggtccctccagaaagagagccggcaggcaggagctctctcgaggcatccataaattctaccctctctgcctgtgaaggagaagccacagaaaccccaagccccacaggaagccggtgtcggtgcccggcccagtccctgcccccagcaggagtcacacaggggaccccagatcccaaccacgctgttctgccgcctgcggtgtctcaggccctggggactcctgtctccacctctgctgcctgctctccacactccctggccctgggaccgggaggtttgggcagtggtcctgggctcctgactcaaaggacaggtcaccttcttcttgggcgagctcttcttggggtgctgagaggccttcggcaggtcatcacgacccctccccatttccccaccctgaggccctcaggatggacaagcccaaacaaagcaacccccacggccccgctagaagcaaagcctgctgtgctgggcccagtgacagccaggccccgcctgcctcagcagccactgggtcctctaggggcccgtccaggggtctggagtacaatgcagacctcgcaccatttttggctgatggactggaacccagccctgagagagggagctccttctccatcagttccctcagtggcttctaagtttcctccttcctgcttcaggcccagcaaagagagagaggagagggaggggctgccgctgaagaggacagatctggccctagacagtggctctcagcctggggacgtgtggcagggcctggagacatctgtgattgtcacagctggggagggggtgctcctggcacctcgtgggtcgaggccggggatgctctaaacatcctacagggcacaggatgcccctgatggtgcagaatcaaccctgccccaagtgtccatagatcagagaagggaggacatagccaattccagccctgagaggcaaggggcggctcagggaaaactggaaggtacaagaacctgctaacctgctggctctcccacccagaccccatgctgcactatgtgggcttcgtccctgtcattgatggagacttcatccccgctgacccgatcaacctgtacgccaacgccgccgacatcgactatatagcaggcaccaacaacatggacggccacatcttcgccagcatcgacatgcctgccatcaacaagggcaacaagaaagtcacggagtaagcagggggcacaggactcaggggcgacccgtgcgggagggccgccgggaaagcactggcgagggggccagcctggaggaggaaggcattgagtggaggactgggagtgaggaagttagcaccggtcggggtgagtatgcacacaccctcctgttggcacaggctgagtgtcagtgcctacttgattcccccagggaggacttctacaagctggtcagtgagttcacaatcaccaaggggctcagaggcgccaagacgacctttgatgtctacaccgagtcctgggcccaggacccatcccaggagaataagaagaagactgtggtggactttgagaccgatgtcctcttcctggtgcccaccgagattgccctagcccagcacagagccaatgccaagtgaggatctgggcagcgggtggctcctgggggccttcctggggtgctgcaccttccagccgaggcctcgctgtgggtggctctcaggtgtctgggttgtctgggaaagtggtgcttgagtccccacctgtgcctgcctgatccactttgctgaggcctggcaagacttgagggcctctttttacctcccagcctacagggctttacaaaccctatgatcctctgccctgctcagccctgcaccccatggtccttcccactggagagttcttgagctaccttccatcccccatgctgtgtgcactgagagaacactggacaatggtttctatccactgactctcatgggcctcaactttgccaccttacaaaataatttcagcccaaggcctcattaaagaccttcatgtaataatagccaattagaaggaaaaataaggccgagtgcagtggctcgcccttgtaatcccagcacattgggaggtcaaggtgggaggatcacttgaggtcaggagtctgagactagtctggccaacatggcaaaaccccatctctactaaaaatacaaaaattatccaggcatggtggtgcacacctgtgatcccagctactcaggaggctgaggcagcagaatcagttgaacccaggaggtggaggttgcagtgagcagagattacgccactgcactccagcaggggcaacagagtgagactgtgtctcgaataaataagtaaataaataaataataaaaattaaaaataaattagcaatctgaaaaagataggaagataaaagtatacctagaagtctaggatgaaagctttgcagcaactaagcagtacatttagctgtgagcctcctttcagtcaaggcaaaaagggaaacagttgagggcctataccttgtccaatctaattgaagaatgcacattcacttggagagcaaaatatttcttgatactgaattctagaaggaaggtgcctcacaatgttttgtggaggtgaagtataaattcagctgaaattgtggaacccatgaatccatgaatttggttctcagctttcccttccctgggtgtaagaagccccatctcttcatgtgaattccccagacacttccctgcccactgcccgggacctccctccaagtccggtctctgggctgatcggtccccagtgagcaccctgcctacttgggtggtctctcccctccaggagtgccaagacctacgcctacctgttttcccatccctctcggatgcccgtctaccccaaatgggtgggggccgaccatagagatgagatccagtacatctttggggagccctttgccaccccactccgggctaccggccccaagacaggacagtctctaaggctatgaccgcctactggaccaactttgccaaaacagggtaagacgtgggttgagtgcagggcggagggccacagccaagaagggcctcccaccatgaggccttgttccctcacttgccagtggagggactttgggcaagtcacttaacctccccctgcatcggaatccatgtgtgtttgaggatgagagttactggcagagccccaatcccgtgcacgtgcacagccagtgcccagtatgcagtgaggggcatggtgcccagggccagctcagagggcggggatggctcaggcgtgcaggtgcagagcagggcttcagccccctgggagtccccagcccctgcacagcctcttctcactctgcagggaccccaacatgggccactcggctgtgcccacacactgggaaccctacactacggaaaacagcggctacctggagatcaccaagaagatgggcagcagctccatgaagcggagcctgagaaccaacttcctgcgctactggaccctcacctatctggcgctgcccacagtgaccgaccaggaggccagttccatgccctccacaggggactctgaggccactcccgtctcccccgacaggcaactccgagtctgcccccgtccctgcaacgggtgactctcaggatgcccctgtgcccctcacaagtgactctgaggctgcccccgtgtccccctcaggtgactctgaggctcccccgtaccccctacgggtgactctgaggcccgtgcccaccttgggtgacactgaggctgcccctgtgtcccccacagatgactccgaggaagctcagatgctgcagtcattagtttctagtgtcccatcagccttggtctcaagaggccgagagggtgcaaccccaggggctcccctcccatcttgagctcttcctgaataaaacctcattcccc

SEQ ID NO: 270 - DNA, 3993 bp, Homo sapiens
ggatttctaggaggaccggcagaggcgcgcataggtgcgtggtgctgggcccgggcgccgcggcaccggtgtaggagcgcgcatctccagagtttcttccatctgggcgacgtctcggtgcctgcggcgggaacggcgctttgcttccctgaggagcttctagagagctacggtggcccccgtgtgggaggcggggggcgtggcggcgtcggggcgtcgctgtcccctcctcggtagctctcctccctcccctttctgctgttaccgggagcgcggtggccacggaacgctgcccggagccgcgcgagggaggacccgacgcgcggcgtttacccagcgcagcgttccaccgctcgggtttggctggataaaataaaaaatggggatattgacctcctgtcactactgcatggactttgatggtttccaatcattactttctcctctgtgtcaatctgcctcttcgagaaattcatactcctgaatagctctccagacccccagctggccatgtggtgagttcagggcccaaatcaagtagtaccagcaatcagggaactcctatctgttttgaatggattcacaccagccacaagcctggaaagatggtgtcacaatctacagtcaggcaggattctcctgtggagccctgggaagggatcagcgatcactctggcattattgatggttcgcccagactcctgaacactgaccatcctccttgccaattagacatcaggctcatgaggcacaaagctgtctggattaacccccaggatgtgcagcaacagccgcaggacttgcaatctcaggtgccagcagcagggaacagtgggacccattttgtgacagatgctgcctctccctcaggcccttcaccttcgtgcctcggggactccctggcagagacaacgttgtctgaggataccacagactccgttggcagcgcttctccccatggctcgagtgaaaagagtagcagcttctctctgtcctcaacagaggtacacatggtccgcccaggatactctcatcgggtgtctctgcccacaagccctgggattttggccacctccccatatcctgagactgacagtgctttttttgagccttcccatctgacatctgctgctgatgaaggtgctgttcaagtcagtagaagaaccatttcttcgaattccttctcaccagaggtatttgtgctgcctgttgatgtagaaaaggaaaatgcccacttttatgttgcagatatgattatatcagcaatggagaaaatgaagtgtaacattctgagtcaacagcagacagagagctggagtaaagaagtcagtgggttacttgggagtgatcagcctgactctgaaatgacttttgataccaacataaagcaagagtctgggtcttctacttcttcatacagtggctatgaaggttgtgctgtgttacaggtcagcccagtgactgaaacacgtacttaccatgatgtgaaagagatttgcaaatgcgatgttgatgaatttgttattttagagcttggagattttaatgatatcacagaaacctgtagctgttcctgcagctcctctaagagtgtcacttatgagccagacttcaattctgcagaactattagccaaagagctgtaccgcgtgttccagaagtgctggatactgtcagtagttaattctcagctggcaggttccctgagtgcagctggctcgatagtcgtaaatgaagagtgtgtccgaaaagactttgaatccagtatgaatgtagtacaggaaattaaatttaagtctaggatcagagggactgaagactgggctcctcctagatttcaaatcatatttaatattcatccaccactcaagagggaccttgtggtggcagcccagaattttttctgtgccggctgtggaactccagtagagcctaagtttgtgaagcggctccggtactgcgaatacctagggaagtatttctgtgactgctgccactcatatgcagagtcgtgcatccctgcccgaatcctgatgatgtgggacttcaagaagtactacgtcagcaatttctccaaacagctgctcgacagcatatggcaccagcccattttcaatttgctgagcatcggccaaagcctgtatgcgaaagccaaggagctggacagagtgaaggaaattcaggagcagctcttccatatcaagaagctgttgaagacctgtaggtttgctaacagtgcattaaaggagttcgagcaggtgccgggacacttgactgatgagctccacctgttctcccttgaggacctggtcaggatcaagaaagggctgctggcacccttactcaaggacattctgaaagcttcccttgcacatgtggctggctgtgagctgtgtcaaggaaagggctttatttgtgaattttgccagaatacgactgtcatcttcccatttcagacagcaacatgtagaagatgttcagcgtgcagggcttgctttcacaaacagtgcttccagtcctccgagtgcccccggtgtgcgaggatcacagcgaggagaaaacttctggaaagtgtggcctctgcagcaacatgatgcccctgagtactgtgaaaaagactgttcaacatgccttatgataacaccgatttgtgtctattattggtgacattgttttagatattgggtattgtatattaaggaaaaagatggtctatattctctttattgcatatacttaatgtttcaaaagaatgcagattctgtgtttaagcacagggctgatagttgtggttttgtttacaaatgttctgttttggctgctattggttttttaaagaggttttttatacttttgtatttgaatagttatgtttcactgatgctgagccagtttgtatgtgtgtgcatatatgtgaactgtaactgacaagatgaattactcagtttctctttctctaaagcttgtttgatgaaactggttggtcctttcagtgaacaaaaatatgaccccaaatctgtttgctctggcttttatttcttcaggaagcagacttccacttaaatgccattttgtgattgtgtcaatcatacacattttatttacttcagagtttgaatagagagtacacatttcttctgcagatttatttcatgatgagtttgagttgcttagcagggcgtgtgggtcccgttgaagtgcagtttgaagcaactgcttctagatggcactctttcaggtggcacaaattgaacctgtatttgtcatctctgttccacacactgcaatgtcaagggatgcagaagtgagtagaattccatccctgcccttgaggatcttgctttaacagatgtaaaactgaacataaggtatttgcagatttaaacgaactgggggaaataatgaacagtgtgattctagtaataacattaaaatcatagacattgactaataaggttaaatgaatcacaaaacctttatgaatttcttttttctaatagttcttatatgttttcctgaaacatgtgagcctattcttttttcttctactttctatatactttctcccacttgagaaaggggccttgaggctgggtcccttcatggtatacctttagactgaacggtttgcaacctagggcttgggcattacattccctgggattcacatgccctaactaaacctaccttgattttctcagacagcacaggcaggcaataaagcgtcacagattgtcccctaaccccatccagccatgtgtatgagtgtgttttattcaatgggatagtactgagcacatgaaagaaatgaatgacttctgtcaatctcttttcattcagtcttctcattctgtcaattgttttctcatccgcagtgcctctgccagaactgtgctcacatccattatttaagccagatcttttctaagtattatagaagtgtagaggcacatagaataaataaaaccagacttcaaaaaaaaaaaaaaaaaa

SEQ ID NO: 271 - DNA, 171319 bp, Homo sapiens
ggcgccgccggaccgcgccccaccccgcgcgcccgagcagggcgactgtcattagcttcctggacgggacccggggcgggatcctggtgtcctgaaaggggcccgggcgaccctaagaggaagaacttttgggggcggggtccccggtcccgcgtcccctgggcagccgctattgtctacgcgcctcgctgggcggcgcggggggcgtgatcgcggcggccccgggctctgggtgcggagacccaggcggggctgggcccagggcggcggcgggagaagccggggaagccgaagagcctggggaggaggagctgcgagcgcgggagacgagcaggagccgcgcgggccgcggcgagcgcgatgccggcggcggcgggggacgggctcctgggggagccggcggcgcctgggggcggcggcggcgcggaggacgcggccaggcccgcggcggcctgcgagggaagtttcctgcctgcctgggtgagcggcgtgccccgcgagcggctccgcgacttccagcaccacaagcgcgtgggcaactacctcatcggcagcaggaagctgggcgagggctcctttgccaaggtgcgcgaggggctgcacgtgctgaccggggagaaggtgagtctcccgggcgccgtggggctggggcacaggggcgggagtcggcggccaggaccccgcggggagcactgcactgggagtcccagtgtgcagtcccgggccaagcgccttccccctccgcccggctttcctgttgggttaaaacgcgcgctcagcatctcgcagcctttcccgaaggcggcctgcggtccgctgcccgggggttgggggcttgggaggggacggccttgccccgggaagcgtcccgcgcggccgttctgctcgtggaagggcgccgcctggcgacactagcgcggggggcgggatggggcccctctgcccttcaggccggcaggggcggcggatccgtggcgaggcgggaaccagggctagaggaggtgggctcttatgtcggggggcggggggggcaggaaagctaacagccagcctctggggggagcttagagtctgatccccgtcctgggctctcggaggaggtgggagaaggctgagatcctgcattccttcccacctgtgggctccggcagctagggaatgttttttggcagctagggaatttttcgtgctcagaggagggtttttgcctccgccctccacttgtccatccctcaacctgtgctcctctctatccactcaaccctcccacccctgccccctcatcacccaccattctcatccccgccattctcatccccttctctccgttcccccagctcctctgtgccctccagcctcagggtgggagctgcagtgaagaccctgctactggcaggaacagaactacagatacctccccccagagactgggagatgccttcttatctttctagaagaggggaaaggaaaggggacctccgcgagaccaaaaggggcacctctccagccttgttggaagttagatggttgtgaacccttgccaggcgaggggcaggtaagatggaaggtgtaacttagagctgtgagaagaaacccaagagcttggtgactcgcttttgaggccgggtcaccccaggctggagctgcccgagctcagagccaatccaggctggagctgtcccaagctcctgtcatctcgggctcaagactgcccccaggctgggggtggctcaaacctggagggggaccagctcctttgtgtggtccgtgggtcagggaggcgtcagccgcaaggagggaaggcggagttcacttcccaaccgagcaggtggcctgggagccgagccctctgccttccgacctgggggcctctgcccagcctggggctgccctgtgaaacccctggtcacagggccaacctgcccttcctgcctgtctctagcctcaccccacctgtagttccctccccaccccatttcccctctttgtcttggagccttttgcctgtgaatgcaggtctccgtcacccttgtcattttccctgtgttccctacagccgttttgagtgaggcaccgctttattatgggtatgtggggatagagtgagtagtttttagaagtgcctcctgcctgaattcccatgcaaaaaaggagcgttcagtatgaacttgagtaagtcttcaaagaaaaaggaaaaacctccaaacctcgttctagtccgcaggagcgaggcacacttacactcctcgattcgattcgattcgattcgtagtgagctgtctgacttccacactgcgggtccgttcagggcgcgaggatgcggctaattagagtgagctctcttctcctggccctgtgtaaattcctgttggcactggcgatggaagtttattttcattggaaacgtataggattcaggctggttgtgcatatttcctctctaaacataacggaaagaagcgagtctttatgctcacaacgtcatggcaaacactgcaagtacattcttctcgcctgccctggtgcacagacttcttttctggcttccctccaccttgctgtgttgtgctgtgcctctggctctgtagcagcgcatttttgcaccataaaactcttggctttggctgaactgcctgggggtggattcagagctcagccagcgcttgggttctggagctctgtgctgggcccactgggaaccccgacatgcagggaattcttgcccaaataggattcacatgaagagactcgctgcttccccaggtgcccactccccttccctcccatcttatgtttcttaaatgatgaatctcacttcattgttgcaatgacaggagatgttaattggatgtaaaattattcccctggacccattggtggactgcgggtaaggatggtggttctttgggtggagaaggaggcaggggagagatgtctgtgttgaaaaacttggttttcccgggatgctcctccccagcggggagaatcagtgctccagggattgcgggcattgggagaaatctggattttagttcactcaattgctggctttaaagaaacaatggtgtcattcataacatttatctcccaaatccagcacctttaatgcttaactaatagatttgggttttagcagattgtggggattaaaatggttgtgtgtgtatgcttgactctgagaaagattgctaaattaaaatgagtcctcattcccactctagttttgggtattgcctaactaaggccaaaacaaagatgaccacagcctcaggctatttacaacctgaagttcttttaaaaggtgagctactaagatgattttggcctggggaaagtttcctccagtgagcagagctgaggaaaaggaggtcattaagcctccagtgtcccccactgtgggtgacccagggaggcctctctccctcattaattcctcttttcttggggtgtgtacattttggatttagaatttcacttttctcctgtcctatctatttattttttaaattttttataaagacaggggtctcactgtgttgctcaggctggtctccaactcctggcctcaagtgatcctcccaccttggcctcccaaagtgctacaattacagatgtgagccactgcacctggcccatccttttataaaggatccattccacattaggaggggaatgaagtcattaatactgtagtgagaagtactcccagcccacgtggagcgaaaggattcagggcagcttgtcttgggaaatcagtccatgaaaaagctgaaagagggcatagggaaacagaagttgagagggcaccccaagtttggcctgcttcatagctgcattctcaaactgtgagaattagttttgggtgatttgtgctaaaatctagggcattgctagttgaaggcatttggtatgggggtgtgtgtgtgtgtgtagcgtgttgtgtttcgacttggttacacttccaaaaagctttgggtgaaatccttcatggtttgctgggaatcactgtctgagtccagatgacaaagggagccagtttttcccaactttccttttaggtttcaatttgatctcatcaagaggctgcttttgccaccactgcctgtaggacaatcttttgcctgcttttcctctgaagttgtttgtttagaagccatttgaatctagatggctcttttactgcttgtaaaggaaagatggcttgcggctgagacctaattgtgtcctcctttgagttaatgcaatctctgttaatctggctttaaaaataaatagttcacttggccatgtgaaactcttaataggtaccttcacagtcagggctgagtgtctttgaccaaagttgatgattagaccagggaaaatgatcacaaaaccagattctgaaaagtaccactctctggctttgagacgaagagcaaagctgttgagcaacagtatggggtaatgactttgaaacacctggagtggttgtgcttgcagagcctggtattgatttgtgatacctatgagaggcgtggtctctggcacataacaagtgccccccgccctggcccccaaccagacagagtgacttgggggctgctgcatgatcagataatatcatctgtcgacagaataaggaaagtgacttacagaaaattgaagtgaggtccagaaacaggacagacgtggtggctcatgcctgtaatcccagcactttgggaggccaaggtgggtggatcacttgaggtcaggagttctagatcagcctggccaacatggtgaaaccctgtctctaataaaaatgcaaaaattagccaggtgtggtggtgcatacctgtaatcccagctactttggaggctgcagcaggagaatcgcttgaatgtgggaggtggaggttgcagtgagcctagattgtgccactgcactccagcctgggtgacagaatgagactccatctcaaaaaaaaaaaaaaaaaaaagagtttaagattttaaatttccataaacgttaaactttaaatgaagcaacttagaaaccacgtataatgtttctaatacagacattataaataatgtttgtaaggaatcagtaaaacaatggtcctttatcatcagcaatatatttggataattccttagaagtttggtttagtggctggacgcggtggctcatgcctgtaatcccagcactttgggaggccgaagtgggtggatcatttgaggtcaggagtttgagaccagcctggccaacatggagaaaccccatctctactaaaaacacaaaaattagctgggtgtggtggtgcacacctgtagtcccagctacttgggtggctgacacatgagaattgcttgaaccctggtgatggttcgtgatacctacaagaggcatggtctctggcacatgacaggttattgtgttttgtaaaaaattgataaaagttgaaaaaatatagttggaaaagctgaatcgagaaaagagtaggtgtatctcaggtattgagccagtgttgtaggcaggcaaactacagaacaagaacagacagtccatgccactgttaccttttttgtgattgagtctcactgagatacaaagttgagtacataaaatgattggttaagatgttgaaatatcttgttctaacccttggttaaagaataataagccggcttgtcacttccatcagaactatttttaggctaagagtaagggttgcctgcttactaagttgccagtaatcatgcttagagcatgacagtgccagatacctggagtgaaggagttactaaaaatacgatttactatgttttgcagagcaagaaatatgactaattttagaggtggccttttggcagatctgtttttagcaagtatttctgaaacaaacaggtgctaaatcctgtatttttgaagtgctagaagtttaggggtaatcgctctgaggaacaagaaatgcttagagaactggaaattcctattaatccttggcagggacttcttggcaagaaggaggcatttgcaaagcacctgcttggtgagccctgtgtgacaaggcagtgcctgtaatttcgaggattgcattctgcagttgcaggcggattcttttgaacttcctgccctgcctcatctttttgaagtacttgtgaatgatggaaattggcacgtagggcctggttcctagtgttcattgatacaggtcccacggacttcaaagggtgctttgagtcagcgcaacagtgcagaaacggtgcccacggagaggagtacaaccctacattttctctgcaggtgttgagtcacggctatagctacccgtgcataccaatccgactcaggtctgtgagactatagaattctgcatgctgccagctattggaggtcagcgcggcaatcatctgtcccagggtttatctgcccagaaggggtggggagtggcagccatgtgcccccgaagagagggacaggttggggtgttctccatgggaaggaggcttgggcacagggttatcatttgccttgggacatatattccctctgtcgattatttatggtaacggagagacctgctctcttggctaattgaaacccgtagataatccccaggccttatgttagctgatgggtgaaacttctttctctactcagccctggtctaagtactgacctgaattgaatttcacgctttctgataggaggtgccactgggtggtacgatgaccagcaggaaagagctagaaacacagggactgaatagtccccgaggagggggatgcctctgtgaattcgagacagctgttccctctcctccatcaccagcaccagcccagtgctacagtgttttacggtttttttcagggtgcccctcccgtgcacattcttgttagatgcctgcagcagccctggtggagggggtaacagccagcttgctggtgttcttgcctgccttgattacgtagaagggtgccctgagtagatcttctctctgacattctctatgagtttgctaggatggttctaacaaattaccacacactgtgtggcttcaacaacagaaatttattctgtcacagttctggaggctaggatccaaaaccaaggtgttggcagggccatgctccctctgcagccacagggagaatccttccttgcctcttactagcttccggtggtggccagcactctttggcattttctggcttatgactgcagcgctctgtctctgcgtctgtcttcacacagtgttcctccctctgagtgtctcttctgtctcttaatcttttcctatgtctctttataaggacaccagtcatgggatgtaggtctaccctaatccagtgttgcctcattttaactcgatgacatctacaaagtccctattttcaaagaagatcatatccacaggtaccaacgggacttgaaggtatcttttgggggagcatagttcaagctccagcacctttttagactgtcagtattgggttgtggcaagcggatcttgggaaggagatgaatgtgcttttagggattactctcagaactgacctctgcaagggaaggggcaaagcagcactgggcagagggagaagctgggctccaataccgctctcagccaaagcccctgcccatgccgtggtgagtgctggagctgagctggcccttcagagctgaccaacttgggttgagaggactgggatttatatttccgcatcggccagtccttgatgggggctgcccaggcaaggggcatggcctcgtacgggacagttgctgagggcggttcctggggagagctcacagctgatagcctgcagctgaggcagtcagttcttcagcactgacggggaatctgggggtgcagcccagcatttgctgtttactgaaagagacagggtcagagtccagggcttttcatctgagtccataccatatggaccgtagacaacgtgggcatcttttccatgcgcattttggatatgagtggtcatcatttccatgtgttggtatcaagtcctctcatctcgttaccttgaaatatacaaagtatggccaggcgtggtggctcacgcgtgtaatcccagcactttgggaggccgagggaggcagatcacctgaggtcaggagtttgagaccagcctggccaacatggtgaaaccctgtctctactaaaaatacaaaaaaattagccaagtgtgtgttcctgtaatcccagctactcgggaggctgaggcaggagagtcgcttgaaccaaggaggtggaggttgcagtgagccgagattgtgccactgcactccagcctgggtaacaagagcaaaaactccataacaacagcagcagcaacaacaacaacaacaacaacaaagaaatatacaaattattgctgctaaatatagtccccgtagcaaacattagcatttagtccttctatctatgtatgtttgtacccatgaaccagcttctcttcagcctgccctaccttgctgctcgactgtggtctctctccctgcaatgagggagcagccggcgtggcatctcattagcagattctatgtgccacacgctgggggattttctggcctcacatttctcttaggttagaatcatcagggctctgttgtgtttctcagtacttacaagattgaaagctcactttatatgtatgctctatgggttttttcctgagaactctggggcaactgagtgttgggccaagttgtgggccagcatgcctacttcagagacggtggcactttcctgggaagagaccccccctcccccatcactcgtgagtggtgggaaaagttgttgaaggagttgtgggaatttggatttttgatgagtagagtaacagtttgggacattctcatggacaaaaaaaactactcagggtagagccatctgttaacatcctcttagcactcttacggtggccactgtgccctagctatgcaacttctaatcactgggttctttttggtttttaatcatctttgtgttttcaagatgcatttggttaagttttggaattggtaatacagacacatggtctgaaattcaaaggttctgagagggtttgcagtgagaggtaactgcttcttatctgggctcttcagttcctggatcttctcgtgagaggtcactcctccttctagtccttgtgtatccctccagagataccctatatgcatagagacccacatacatatttgtaaatgcgtagttaggggcagatttttcttctttattgatacataatattttacatatttatggggtacatgtgagtgttccatgcatggagtgtgtaatgatcaagccagagtatcggcgtgtccatcacctaagtattcatttccacgggttggtattatatcaagtcctctgttctagttaccttgaaatatacaaagtattgctactaagtatagtcaccctaacagacattagaatttagttcttctatctatgtatgtttgtacccatgaaccagcttctcttcatccatccctcccacccaccagggcagatgtatttttaaactgtacatgctgttcattatcttgctttttcacttagcaatatgtcttgagcattcttccccatgactactacagaattgcctcactctttatgttaattagttattgcatagtagtcattgtgtggaagtatcatgttgacttaaccatcccttgttgatggacatttagggagtacataatttttttttttttgttattctcaaaccatacttcagtaaatatccatgaccatttgtcactttgtaaatgtgacccctcagtgtatctgaggggtaaattcctagtcttaggccaaaaggtatgtctattttaactgttgataagtattgccaaattgcctgccatagaggttggcaatttataatcacattgataacccttataatttataagggttcccaacttataaccacacccatctggtatgggagtgtttgcttttccacatgtcagccaacagggtactcattttgatctttgccaatcgagtgtattaaacatggtatcttgtcttatttattgtttctcttatttacatgggaattgagtatattttcataccttctcaactgtttgtacttcatttctgttcattgttcatgtccattcgccaattttcttttggggttttggcctttttcttattgatttataggagctctttatatattaaggaaattagtcgtctttgagtgatatattttgcagtgtctaccaccttccctcgctccccattattctttctctttttctttgtggttcttgccatttgcagaagttatttcttgggagttcatgaactagagaaggataattgataagttttggaggtctatggagccctatcaattgtgtgcatgtaaacatatttctgaggagagggtccatgggtttcgtcatactctaaatggagttatttacctctaaaatattaagagccactgctttgttgcccacccttgttggctctgctgactaaatggaagtctgcagattactgggctgagggtttgggtcaccttggtttgttaacaccggtgccagttgggctacagttgtagattatacacactcaggctaggcaggttggttctgcaaccatgaccctggagtaagcacccttgattctgccccgacccttaccatgcctggattgcaagggagaggcatgatactgtgtgggatggtctttggaaatctttgactcttgctggtttaagtaagacaactgtgagtccatgtcccatcatctcttcatgggaaaggtggtaccatttatggtggatggttgctatgatcagaatgtttgtgtcccccaaaattcttttgttgaaattcaaacctccagtgtgatggtatttggagatggggcctttgggaggtgatgagatctaccctcatgaatgggattagtgcccttataaaaggtgcctgactgaggttgcagtgaaaaaataaaaaaataaaaaaggccaggcatggtggctcacacctgtaatcccagactttgggagggcgaggtgggtggatcacttgaggtcaggagcttgacaccagcctgaccaacatggtgaaaccccatctctactgaaaatacaaaaattagccaggcgtggtggtgggcacctgtaatcccagctacttgggaggctgaggcaggagaatcacttgaacctgggaggtggaggttgcagtgagccaagatcatgacattgcactctagcctgggtgacaagagcaaaactctgtctcaaaaaaaaaataaataaataaagggtgcctaaaggagcttgtttgtccttccaccatatgaggactcagtgaaaaggtgccatttctatgagccagaaaacacgccctcatcagacactggatctgcaggtgtgttaggcttagacttcacagcctccagaactgtgagaaagacacgtctcttcttttttttttcttttttttgatggagtgtcactctttgtcggccaggctggggtgcagtggcaccctcttggctcactgcaacctctgccttctgggtcaagtgattctcctgtctcagcctcccgagtagctgggactacaggtgcgtgccaccacacccggctaatttttgtatttttagtagaaatggggttttgccttgttggtcaggctggtctcgaactcctgacctgaggtgatccacccgcctcagcctcccaaagtgctgggattacaggcacgagtcatcgcgcctggccaaattgtctgttctttataaggcatccagtctatggtattatggtactatgttacaccagcccaagctgactaagacagtggttgagaagaaagagaaagggggaatatcgagggaaatgaaaacctttcaaggagcaagagccattacgtaacttggacataaaatgcactaagacaggtattagtacattaatgcgtgtgtgtgacagtgcatgcgccttggcactcttcgaggggctctgtctatttgagatgccctctgaggagcagccttggtggggccgacaggcgggccctgctgttggaattcctgtggcctcggcctgacgaccgtctctgaatgccctgtcccctgtcactctctgccccttcactctgctttgtccctcctcaccacctggagtggtttgctagagctgccataagacagcaccacagacccgggggctggaatagcaaggccttactgtctctcattctggaggctggaagtccaaaatcaaggtgttggcagggtgggtccttctgaggcttgtgcaggatggatctgttccatgcccctgtcctcggcttatccatggctgtcttcttcctgtgtctctttacatcgtctgccctccacgtgtgtctgtctctctgtccaaatgttcccttttgtatttttttatttttttgatacagagacttgctctgttgcccaggctgttgtgtagtggcacaatcttggctcactgcaatctctgcctcccaggttcaagcgattttcctgcctcagcctcctgagtagctgggatgacaggcacgcgccaccatacccacctaatttttgtatttttagtaaagaccatttcaccacgttgatcaagctggtcttgaactcctgacctcgtgatccacccgtctcagcctcccaaaatgctgggattacagactatagacgtgagccaccacgcttggcctatgttcccttttgataaggacaccagttcaaattggatcagggcccaccttaatgacctcactttaacttgattacttctctaaagacctcatattcagggggctaggcgcagtggctcacgcctataatcttagctctttgggaagctgaggcaggcagatcacctgaggtcaggagtttgagaccagtctggccaacacagtgaaaccctgtctctatgaaaaatacaaaaattatctgggtgtggtggtgcacacctgtaaatccagctactcgggaagctgaggcatgagaatcacatgaacctggctgggaggcggacgttgcagcgagccgagattgcgccattgtactccaaactgggagacagaatgagactgtctcaaaaaaaaaaaaaaagacccctcatattcaaataaagtactgaggtactggggttaggactccaacagatgaattctggggggacataattaaacctttaacatcacctgatcccatggaatatatttagagttgatgtgtttgtctccccactagagtgtaagccccatgaggaagagaccactgctctattccccgtgccaagaatagtttctggtacagagaatatgctcagaaaatactttttttttttttgagacagttccgctcttgttgcccaggctggatcttggctcactgcaacctccgcctcccgggttcaagcgattctcctgcttcagcctctcgagtagctgagattacaggtgcacaccaccacgcccagctaatttttgtatttttagtagaaacggagtcaggctggtcaggctggtctcgaactcctgacctcaggtgatccacctgccttggcctcccaaagtgctgggtggcatgagccaccgtgcccggccagaaaatattttatgaatggatccaagcatggtttgatcttcccaagacatgtggacagccttctagggggtaatgtccaagttggcaggctctggttctgcaagcgctgtatgtttctctcattccttgctgctctgggtgtgcctgtctgggtgatgactatgttgaatgggttgtctggctggtgctctgtagaaaaatcctggcccctgaacagctgtgctttctgcggggatttagttaggcacctaggtatctgagtgacaggtgactaaccagaaccagacagtattttgcagtgtcaggggatgttaacggaccctctctctttcctgagaaaatgtagcaacactgcaacagatgggagaagttgctatttgcaaacatacattttattttggatgtttcccatggagatatatgtaggtttggagtctgtctctttgactgtaatttttttataagtttattagtctcctaagccacattcctgccaaaacattttgcaatcctgcttgcttctcttgcccattttctgagccatttgattcattctgggctccctccctgcatcaccactgccattttagtcctctttttgagttcttgttgtcttatgtccaaccccaaggctttttggtaagtcgtcaggccatctttctgcctttcttcagacgctcttgtatgtgacgctcctctctttgtcaccgtcggctctttgccggggctctgtgtgtagcagcttgaaagcgtgcagcagtagtgggtgacccgtgaacacagagcgtggtgctaagagataaaggaacagtggatgttgtaaccgccttcggggagcctcgccagctctgtttagggatgatagaatgaagtttggattcttagcgattcccttgtctacctggagcagaacacgggtaggcaggttatgattgcataaccttccaaatcagtaaaaacctgcaggaaagaaatgggtacatggtttttgctttgatcatgaggaggtcatactgatcacgaaaataatgaacatttgtggatctcgtaccatctgctgggccatgtcttggatgctttgctgcatgagacaacttactcttcatagtagccttttgtggtaggtactgttgtcctgattttgcagattaagatgaccagaatcttggtttgcccaggactctcttaagtttaatgtaggaagtcttggatttgaggaagcccctcagataatgccaaaaccacattcacccaggaaaatatttcatcagagtgtttggagtccaaactgcaggtttccgaataacagtattaataagcagccaatcaggtcatgaatgagtgaagaagtaaagcccaaagccctgggcgttactgggatgcttttgttggtaataataatgtccctgtgtgctcccagggactgagaggtgcttttctcacatatgtagtacagatctaccatctttatgggttcacatgagatgaggagcttgagctattaataatatgtgtgttaggctggacgcagtgctcacgcctgtattcccagcactttgggaggccgaggcgggcagatcacttgaggtcgggagtttgagaccagactgaccaacatggtgaaaccctgtttctactgaaaatacaaaattagccaggcgtgcatggtggcgcatgcctgtaatcccagccactcgggaggctgaggcaggagaatcgcttgaacccaggaggcggaggttatggtgagccaagattgtgccattgtactccagcctgggcaacaagagtgaaactccatctcaaaacaaaaacaaaaacaaacaaacaaaaaaatgcaaaaaaaaagggggttgtatgtgcacacacaaatgtatgtgtgtatatatatataaatgcatatacacagatgtatatgtgtattatatataacattaaatataaattatataatactatgctaaatacatacacgtttttgttagcagacttcctcaatgaaggaagcagtggggactggtagctctctgagtagctctggttcgcatcagtctaactctagtagtacttctcttttgcgctgggggctgaaaaatctactggaggggagagaggtttttgaatcacatcgtgaagctggaagtgcattcttacgtcacacagtgaacagtcccttccagtctcctcgttaaaccatcctcctacgagaatgaacacagattacttattaaaaacaaaacaaaatacccagtgcttttgccttattatgctgacgatttggaggcagaccagctttcccaagccattgcttagtccccggttgggctgagaaaggacatgagaggcaaatggaatgaggaagtgcctcaggtgaaaaggaagcttagggaaagttagctgtggagtctgagatcagaatattttaacattttatctgagccctactttagtgaaaccaaatggataaagataagtgttatcacttatataatctggtttttagttggaattactgctgctctgatgtagctttctcagtgcattcttgtttccaggttaaaaatttaattagagaaactagtcgatgactcagttctcagttgaacatttacatttaataatactaataaagaaaacttgttttgaaaacacatctccaggttttcatagtgtcattcccatagggtgacattttattctattaaaagctaacatttgtgagaagtagttgcaatttcaaggccaatttgacataataaaacttgaatttctctctggagggaaggtgctggatggctattttactcccacctaatttattactctgagatgctttttccaagatcaagaatgagctttttatcataaaggccattaaagcagctgagaaagtacctgagaatgtgcggggtaacagatagtttctttccagtgttcagacttagaattatgtcctccagatttcaaagggacatattactcaacagtgcatttatttttaaaaagtctaatataaatcagtgttttttctatgatcaactataaatattttaaaaataatatatttttaagtatttttgaccaagcattaagaattttaaaattctttaaatcagttaagtcacaggtatattccagaatagttgagatttttaacagatcaaaagaagtcttgggctcatatttgatagttgccatctaaatcatggccacttatacatacttttttattgtcaactttgccacttgttactatactaatcacattgcattatccattctctctgttttagataccttttttttttttgagacagagtctcgctctgttgctcaggctggagtgcaacggcacagtctcggctcgctgcaacctctgtctcccgggttcaagcgattctcctgcatcaggcttccaagtagctggtattacaggcacccacctccgtgcccagctaatttttgtatttttagtagagacgggatttcaccatgttggtcaggctggtctcgaactcctgacctcaggtgatccactctgccttggcctcccaaagtgctgggattacaggcatgagccaccgcgcctggccggtaaatattcttttaaagtttgatttttggtgatgcatagcattccattatttggagttgctgtaatttttaaatccagttcccaattgttggacattgaggttgttacaaaattttccctggatacatgatactgctgttgctatccttgtatgttcatctctgagtcattccttaacataaatacttggaaggcttttgacatattgccacattgcacttcagaaaggttgtaccaagtgacacaacagatatgaaagtgactttttaactgagcattttgataattaggctaatcataatttgtgtacttgattgaaaatgtgtttcttcttttatgaactgttactagtaattttcccctatctttctcctgtttatcttattggtttatagaaactcttttcagattacagatattagctttttaatcttttgtttaaaaaaaaaaaaactttagacaaattaaatttgacggtttaattagcaaagaatgatttgagaaccgagcaccccccagccctggcccccaaccagacaaaatggaagtgaggtacagaaacaggctggatgtggtggctcatgcctgtaatcccagcactttgggaggccgaggtgggtggatcacttgaggtcaggagtttgagaccagcctggccaatgtggcaaaaccctgtctctactaaaaatacaaaaattagctgggcgtggtggcccacccctgcaatcccagctacttgggtggctgaggcacaagaatagcttgaacccaggaggcggaggttgcagtgagtggagattgcgccactgcactccagcctgggcgacagagtgagactgtgtctcaaacaaacaaacaaaaagaaaagaaacagctggattgcttatagcttggcatttgccttatttgaacatacgaacacacccgtgattggcccagactctgactggtacaagagcaggttacatttaataatactgttaaatgtattattgcacatctgtttacacatcctgttaggatcctgtttacacatacaagtgaggttacagttcactatgtgcagagaaaccattaggctgaacttaaaatatgtaagaaagcatctttagctaaactttatttaacactttgttatgttgcgaatattgtctcccaggtgatcatttgccttttgattcatcttatggtgcttttattttaggaagggggcaaaggcacatggaaattttgtgttttgtctaaccaatccagtagtcttttatctttagttttctcttattgcttttatgcataagtaaactagagggcttgttgttggttttgtcttataaatgatcagtgggtccagtgtttcatagttgtctgcagaaaaatctttgcattgggtagggatatttgactatatattctaatccgttacataatgatttaacctgttggtgttatgtactaaagcacaggctgtgggggctgacagcttgggactcctatctgctttctgctacttggtatctgtgtgatcttgggcacagtgttcaaaaactctaaacttcagcttctgtatctgcaaaatggtgacaaagatacctcatggtattcaatgagaatttggttaaaaaaaaaaaaaaatatatatatatatatatagagagagagagagagagagagagagagagtgtgtgtgtgtgtgtgtgtgtacagcacgtagcctgaaaatacagtcattattgtgttagtcaagaaaaaagtggccagacgtggtggctcacacctgtaatcccagcactttgggaggccgaggtgggcagatcacctgagatcaggagttcaagaccagcttggccaacatggtgagacctctgcctctataagaaaataccaaaaaattagccaagcctggtggcgcatgcctgtagtcccagctacttgggaggctgaggcaggagaatcacttgaacccaggaggcggaggttgcagtgagccgagattgcgccactgctctttaacctgggcaaaagagccagactctctctgaaaaaaaaaaaaaaaaaaggaaagaaagaaaaaaaaagaaatggtagttggttgttctcttcatttagactttcatagttatatttccgccttaaaagtatgtattatttatggtcttttagatagtaagaaacagatacccactcagtttatcatagataacggcattttattttaaggataaagggaggtgaggaaaaagatgatggggacgcctcttccgtcaacacctccctgaggaccgcgatgcctctctggatgtctgcattcctgggattccactttcctcttgcccacctctgccgcagacctccctttcttggcagcttctgtggttccttgggcgcatcctgccattcaccctgccccctgcctcaaggcttctcactattcctggcttctctgcctcctcctgtgtttcactttttgctctttctggatgtaggggagggaaaaatgtcttccctccacccgtctacttatttggttgggctacaaattaaatcgacataagacagagtagcaggaggaaaaccacatttaaggacatcgtatgcatgggagtcccacagaatatgagactccaagaagggccaggtcatggaagcttctacagcaacccgagctacagaaaagaataggggcttggggctttgggggtggtggcaatccgttctgggaggatgaggggaaggaatgtacggtggtgaataaagcttgtcttgttatgcagataaaagtcttccaggtaataaaaagttacctggagcaactcttttcccgatacatgaattttctttatagatattatttgcaaaaggacagcttttcggagctgcttctttgtttgcagtttctcaggataagcagctcaaactatgccaaagaactctaattggagtgtcatgttctggtctcctatagtcatgtttcggggtggttggtgtgtcttgagccccaacatgggtattactgggttgtcttgtatttctgggattgatgacatcgtggtagaagtgtgatactggaatccttactggcctcacctccttgtcacctttttgccactgagcgtcctttaacagcagagaatccttttcacagtggaataaagaatgctatttatagatgattctacacgagttaccagattagtatggtttgagaaagtttgtgggacaattaattctccatgtttttgatcaggtaggcaacacctgcctcaacactcaggaaaacatgttactgcctttaagggttatactttctcccatgtttgtagttgtagggatagcttaatgcatttttttcactgaccctttgctagaagttctgtcatttccaatgtgcatcgaaggcctctttagcttccgggactgggttgagaattttgtcttggattcttattgccaaaatctctgggtttccaattcctgtggtttctcccttcttccccgaggctgcgttattcttgtaccttttcaactgcttttggctgccagttgtcctctggtgtgagaatagagtattgattgcttcctgttgcctgtgggacaggaatgcttcttgaattagagctaattttggagtttaaagtattaaatgtcaaatttgaaagaaagcacatctaagacctctttgttgtggaagcgaaggtcatcccagggcctaggggaagggaaaggaagaaagaaaagagaaaggagaaaatagctgatgacttctccctcttccagatcattccctctacactcatggaatgctctttccattttcgtaaaatccatttttagactcagaattctgcatctcaagccatttgccaggtgtactgtgatgtcagaatactcactgctggggaaatttcccagttgtaactagcttaaaaaataaaacaaacgttacctttacttggagatgatcatttgttttgtcattcaaacacttaatggtggccctttttatgcagagctgctggtaacctgtatgggcttttgtacacattggaaaagctgtgccttgccagaccaattagaaaaagacatcccctctgggtgaaccaattaaaaaaaagcacttcctcaagtgggccaattagaaaaggtgtcccctctgggcagcccagttggacaaaggcttcctgtttgaatggatgcagctgcaaggtgcatggtttagcaagcagacagcattgcgggaggaaatataccctttgctctagggcacagagttggcaagccaagtggggtctggatttcttcccccaaatggccccctccattgggtgcttttgtctgaggcaccaaatgcaccgcgaacaggctcaacaatctgatctgcacccagtagttagagctaagctgtgaatcacaaacacggaactcatgttattacagtggaaaaggccatgtttcttccaacagtgactgattaagtgtcccaggattttagcgaatctcaggtaaaaatctgcagaatcagtcctggtctctttctttggcaaagtctgcttcgttgcttgttctgtaagagaaagagaagcaaggtgaagaatttggatgataaataaattcagtgtgtttatgtcactcaaggcccaggagacacaagacatgctctggcatatgtaacaattagggtcttgggggaatgcccttcacgagacctgtgaactttgtgtctcctgagtcatcattcaacctgcttcaggggcccagggctctcagacttcctgtgtgttaagagctgaagcagctgttgaactagggtctcagagactccagtctgcaaattcgaagagaaaaattctccccagtgttgattacttatcagcccggttcctttcttggatggggaaatggtgtgacaatttaataacgggcctgtgacaattacatgcaagtggagagaatgaaaaaccagccttggaacagagatttttcttttctgggaatggtacgtggtggttttggctttctctatgtgtaatgggagaggcccatccatctctgtgtgacagaggaaaatttcagcattaggagagtaacttctgatttatcacaaacagctgggtgggccatgcctcactggtgcccaggcttaagcagcctttgaaatagagttgctcagtgtggcttctgcatctgaaagggccagtgagctgctgtgtgtttcacagtggttgctgagctcttgtcatcctgatcacccctggtagagggtcagtgtgaaggagggcattaccttgaacctgacaagtcttgtatctgtcaaggtgtttgctatgggctgaattatgacccccaaccacaaattcatatgttgaagtcctaacccccagtatctcagaaggtgactgcatttggagataggatcataaagaggtaactaaggcgaaatgaggttatctggataggccttaatccaatgtagctggtatgcctagaagaagaggaaatttggacacagatgtgcgcacacacagagagagactgcacgaaggccacagtgagaaggtggccattcacacgccaaggagaagggcctcaggaggaagcaaccctgctgacactttgatctcagactttgggcctccagaactgtgagaaaatacagttctgttgttggagctgcccagtctataatcctttgttttggcagcccgggccaactaatacactcttcatacacctccatttgctgagtgtcccagaagctaaggtcggcttcaggaatcatgccgggaaacttcacctgattcacgagaccactttctaatgggatcctcctcttcagtaactttttcctctgggaaggaacctggggtttctctctcttacttcttgcctcactaaactctgttctgtaacaaatcacattctgtgcagataccacgatacctggaaacaatctcctccttgagtaaggaaatcaataatattcactggattcctgacttgtatggtgttgtgtgctgtctcattccatgttgggtcaagaaaaaaacaaacaaacaaacaaaaacaagaaaatgttgtccctctagtggtttcttggtttccctggcatatttctacaaaacaccgtcaaaagaagaaggtgtttgaggttgctattagaatttcttcatggacacatataaatgtatgaaattattaggatggtccataaagctctttatattgtttgtaggatattgacacatgacttgtgattactttgcgtatgatttgtgtgaacccaaaagattattctctgtagctcttaaaatgttcactctttaggaacactcttaaagtgatcaactaaaaaatgttgttgctagtagcatgatgtcatgtggattagttgcctatggctaccataacaaagtactataaactgtgtggcttagggccaggcgcggtggctcacacctgtaatcccagcactttgggaggccaaggcaggtggattgcttgagctcaggggtttgagacaagcctgggcaacatggggagaccctgtgtctacaaaaatacaaaaattacccagaagtggtggcgaaggcctgtagtcccagctacttttgggaggctgaagtgggaggatcgcttgagcctaggaggtggaggctgcggtgagccgagatcacaccactcactccagctgggttgacagagcaagaccctgtctcaaagaaaccaaaacaaaaaaaattagcaacaacaacaaaaaactgtgtggcttcaacaatggaaatttattgtctcattctggaggccagaagtctaagatcaaggtgagttggttccctccgagggctgcaaggaaaggctctttccaggcctgtcttccagcctctgatagccccaggcattcctggcttgaagggcatcctccctctgtcttcacatcatcttccctctgtgcatgtctgcctcttgttcaaattttccatttaataaagacacaatcatgttggattagggcccaccataatgacctcatcttaactggatcatctgcaaagactctatttccaaataaggccacattcacagatgctgggagttaggactccagcatcttttgcggggacagaattgactcatgacaccatgttattgtttttcttatcccatctcattagccgcaaaaaggtctttggaccctggaagcaaagagcaagagacaggcaaaggccaagaggacagtgaaggaggtggggtggtcagggctaaaaggtagactgccctgggcattgatgtttcttgggctttgggtggagggtgctgcctggaccttctaggtagcttcattgcctctgttccaccatgttctatctttccgagatgctcacctcctccctgccctgggatgctcatcattgttaagtgcacttgggcttatggttcattggcagttctcttggagagagaaagagggaggctacgtggagtagggatgcattgcagagatacgacagttatgctgacattctgttaaggaagaccttagactctggaaacagacttgaggtgcaagaccccccgctggtctggcttccaggagaaggccgagaggtgagtcacacagggcagtatttctcagtcttattttttaatccatatactctgtagtgaaaccccacctgggcaaaaccattttatgttttgtgattaccattaggacaagctttatactttgtgggtatttatttaatttatttttgagacgtagtttcgctcttgttgcccaggctgaagtgcaatggcgcgatctcggctcactgcaacctccgcctcccagtttcaagtgattctcttgcctcagcctcccgagtagctgggactataggcatccgccaccatgcctggctaattttttgtatttttagtagagacagggtttcaccatgttggccaggctggtctcaaactcctggcgtcaagtgatctgcccacctcggcttcccaaagtgctgggattacaagcatgagccaccacgcccggccgtggattttttattagggcaaaaataggtggactgaatgtgcctttttcagctcacttttcttctcgaccctggaggactctcccgtcttttggtcacccctatggagaggccctgcattgagctttgttgtggagtggggtggaacagggcaggagtggggtccaagcttctggaagtgtaaggagagaggatgattaatgtcaggccagctctgcttggaatgagtttgagaagtttgagagaaagggcagtgtctactgatgctagaagactgatatgaaagcaaagcttttaatatccacaaagcatccgatcaatatgcctaaatagtttgttaggctcctcttaagaaataccatctgtgagcttattctcttttatggtttaacgttacaaacacttgtaatgtatgttatcgtggaaactgaatgatgataagctgctcttaagttcccaccctcttcccttgttctcggtaggtttatgagtataaaaggggaaaaactcattctgcacttggtgccatggaggaaatgatttaacaagtcgaggctggcaacgacttcctgctgcactgattttacttagatcttcccttttaacgttctctattagtttcctgggctgccataacaaagtaccataaactgggtagtgtcaaacaacagaaatttattatctcacagttctggaggccagaagtatgaaatcaaggcgttggcagagccatgctctccctgaatgctgtaggggaggagaatcttcttttcttcctagctctggtggttgcctgcagtctttggcctgctttggcttgtagatgcctcactccagtctctgcctgcaaattcgcgtgacctttgctgtgtgtgtgtgtctgtgtttcctcttgttgtaaagacatcagctctatgggattagggacccatcctactccactatgatcttatcttgactaattacatctgcaatgaccccatcttcaaataaggtcacattctgaggtactggtggttaggacttcaatgtatctttatgggaaacccaatttaacctataatgtgttctaaaccaaactcgttgcctttgccactgaccaatctgcctcttcttcattccctgctactcctgctcagcaccatcttggttcctccatcttctcagtcccttttgggttattcagctcctgtaagttacacctctggctgctgtgtgttttttttttttagacagagtttcactcttgtcacccaggctggagttcagtggtgcgttcttggctcactacaacctctgcctcccaggttcaagcaattctcctgcctcagcctcccacgtagctgggattacaggtgcctatcaccatgcctagctaatttctttttaaatggagacggagtttcaccatgttggccaggttggtcttgaactcctgacctcaagtgatccaccctccttgggctcccaaagtgctgggattacaggcatgagccactgctcccagcctctggctgctttttgatttttatctcctactgagtccctttgacacagtctagtttaatcctcgttcattctccccatcccctgttcctcgcagcataatccatcctaattgcctagaaatgaactctaatgagtccacaaactctccaggcccaccctcctagctccttccagccccactgaaatgccacgttagttcttcctggagcctgccctcctctgcccagctggaggtagtttctccccgctctttgttctgtctccatgtcacctctcttactccatgcaacatcttgagcacaagcaagcgtgtggtagctgcctcccaggttgcaggattatttaggctagaaccaggtcttagttactgaaacacacacacacacacacacacacacacacacaaactctactgtgctcgtcatgatttttcacgaatagtgggtactttgacagactcggtagaatgcaggtctccatgtggaagctctggctacaattctgaggttttgtcatggtccaaaggtctcctcttcgagtctggctctcttaacaacagcactctactacagagccctgcgcgtgcagtgatacctgagttaatcagtactctggaagtaagcctttatccagagtcagccttgggtttatcgtgtttattgtttaactttctgatggactggacacggagtggttgggaagaatttcccagggtagtttcagtatggatcagatgcctgtagcccttgagtactgcattcgtttcctggggctgccatgacaaagtgtccacagaccttagaacaacggaaactgtctcacggtaacccagaaggagctggaagttcaaaatcaagttgcaccctctgagggctttggggaagggtctcttccaggcccctctcccagcttctggcacttccgtggctactggcagcacgactccagccttcccatggcattctctgtgtgtctctgtgtccaaatttctcctttttataaggacgccagtcatattggattagggtacacacaaataatgtcgtcttaattaattacatctgcaatgacctgatttccaaacaaggtcaccttctgagctgctgggggttaggacttcagcatgaaatttgttgggggacacataacaaacacataacaggttctcagcttgagttcttctgtagagtctggggtgtgtctgctgggtgacttggttggtcactgaggtttgcagagggtagagatacaccctcagtggtgagtagaagggtgtgaccatcttcacctgtactgtccccctctaggccctgggaaagcaactcccggtttgtacacctggcttttaatgcattgccaggagttctctgatgtggaggccttggcttggtggcaggaatgatgagcttgggctgagcaggcagcctgtgtcacctctgcttgacaggccacagagattggcaggccgcctcagagggagctttgaagtctcaaagttaaggacccagggccagtcacatctgtatttagctaatgtttaaacttgtagctcacctgttctgtttctcacctatactgtttctccctctgcaaactaaactatgatgctcaggtgtagtaaggctacttctgtatgccaggagagcataggttgtcttgcgaggatgtccatggtgtagagatatgggaattatgcttttaaagtgacaaatttggagagtaagatgtttttgtttttctttggtcacattgaactactacctgatttaggtgttcacaatgatcaaataacccactgggttatttgaggcccagctcaggcctcaaccaggtcataccacccctctagatggcaaggggctacttagctgtcggttgagagtcacatccatgcctgaccatgtcccagctggacagactgtgggcaagtttcccctctgtaaaaaggcataggtgtagaccacagtcatgaagccatataaacctccaactgggactagtttcattgaataagcacttgataagcaagaccctgcaaaacactgtacatgcttcatgtaactcccacaagccctacgaggaagaatatgccattatttcccctttttacagaggggaaacttttggttcacacagattaagaaagttggccacggccgggcgcggtggctcacacctgtaatcccagcactttgggaggccaaggcaggtggatcacctgaggttgggagttcgagagcagcctgaccaacatggagaaaccccatctctactaaacatacaaaattagccaggcgtggtggcgcatgcctggaatcccagctactcaggaggctgaggcaggagaatcacttgaacctgggagacggaggttgcggtgagccaagatcgtgccattgcactccagcctgggcaacaaaagcaaaactctatctccaaaaaaaaaaatcttcttcctcgtagggcttgtgggagttacatgaagcatgtatagtgtttcgtagggtcttgctggtcaagtgcttattcaatgaaactagtcccagttggaggtttatatggcttcatgctgtggtccacacataggcctttttgttttcacaccatgaaatttacagagaaatggcgattgtccaaagagctcatcaattgcatgcttattgacagctaaactagttaatttaggccactaaatggatctcccagccattggaatatttactaagcttaagttaatcagacagttgcctacatttatttattgattttctagaccatggagatccgccctgtgtgctgcttaattataagctctcacactattaatcttttctttatgtaatgataaaatgtgtttaatataatgagattaacactactgatccacttttgaaaatgtgatcatgatcaaagtgtctaattttactttttttttctcggtgcgggagagaggtggaatttgcaaccaataaatcttgattcgatgaaagccacattaaactctttctaacatgattttaacataacaaagctccattaatgttgatgaaagcaatggataacttatgcttgacccaaattcagagcatggggcccagtgggatagaaaatcataaactgagaataataactccaatcacagctacccctccaccacaaatcaaaaaagatatctcagaatttaaaatgtattttcataatgattagttcttgtaagtggaaaacatccctttgaagtcgatgatattctgctctctagaaataattcttttattgaacttgactatataaatattcatggtgctgcgtgtgtatatttcatattgtttcattagttactttttagtcattggaatagtaaaaaatgttcgctaggtactaaaaatactgtggagttgaaaataattttcattcttggccacacagattaatttactcttgccaaaaaaaaaattacctttacagctaggcggttgactaaatgatgaataagaagtctatattttaaaagaattttgaaagttagtgtcctggatagaacagaaatgtttgtgtttcagtcttggaattgtctgtgtgactctaggcaagtccccaaacctctattaaataaaatttacccctccgttaacggaaacaaaagtaaaacccccaattgttccttcagtgatcacagtttcaaaaggactgtgctatttctgcatgttcacaagatgagacccagaagattttggagaaagtaagaggaatgttttaagttagtttttctaaaacgtcctcaggttgtatctaatgggatcaacagtattggttgaaagtcattagtttcttctttttgttttctgatagctgatttagatgatgttactcttcagtcgtgatgctgtttaagaaaactaaacaaaatcaactaaagaaatagcccacttgctggtagctgtgaatttctcatccagtagttacagttactgcaagagtttaagtacctcttcatggaggtattttgagttccccttttcctgtaagctaagcaattagtctcggttctccatctagtatacaaatcatggctattcaccacaaaagattggccttttatgttcaaatattgaaatcccaggagattttgacatgtattttgcttcaggaaatctttttgggtctactcttcgggccccttctgtctctgtttacatgttgctaaactttaaatggttgaacaaatggtaaagagtagaaactacatttatctgatgtttcctaaactttatgcctcactgaaagcagctgagaaaatgaaaatccaaggtgactaatgcaaataaaaagatggtgacctctttttgcaaagataagcaagaagtagagatgtctccaaagatgccagcgataggcttatttgcagaaaagttaatagcttaaaatcgtatttagaaagtcataagctgggaaaacatgtgacagagagaaaaggaactcaaagtatcaggtttgcttggagatgtcttgggattgttggcgtttccttgagtcatgttgcttcctctccggagtttccgtgggtcttccgtgttttagatctatttcttttttccttagttctagaattcgtgataaattttactggtgttatgggctgaattgtgtcccacccccaaattcacatgttgaagccttaactcctagtaccatagaatgtgattcgatttggagatagtctttaaacagatagttgagcgggatgtggtggctcatgcctgtaatcctagcactttgggaggccaaggtgaacggatcacctgaggtcaggagtttgagaccagcctggcctcaaaccctgtctgtactaaaaatagtagccagcacggtggtgcacacctgtaatcccagctactcgggaggctgagatgggagaattgcttgaacccgggaggcagaggttgcagtgagccaagattgcaccactgcactccagcctgggcaacagagtgagactgtgtctaaaaaaaaaaaaaagaggtagttgagttaaagtgaggtcctgtgggtgggcctcgatccaatctaattggtgtctttataagaagaggaaatttggacacggacacatagggaagaccgcatgaagacacaaggagatgataaatggggtaataggaaatagattattagttaatttcacctgttactttttaaagccacctacaagcctaggagagaggctccagacgtaaccagtcctgctcacaccttgatctcagacttgtatcctttcaaaattgtaagacagtaagccacacagtcggtgatactttgttgtgacagccctagcaaacaaacacactgggagatagtaattaaaatggttgaaagagcaaaatgtattgaaaaagaaaaaggagtcaaggccggcatcttatgatctccatgtcgttcttcccaccatgtgcacacgtgtgtgcaaacctgcgcccacctcccactgagctccctgttatctgcttatggattcctggcccttcctgagagccattatctgctgtcagtggaagcagagcattcattattcccagccagtgcagggaggccaggaggatttatggagtcattgcaggaacacaaattctgctttgtacagacggacaccataaacgcacatgaataaatcagggcagagtggaaaaaagacctacttttccctttctcatgaacacaggcatgggggctagccccgatgtttagtgtgtgatttagtgggggaggaaggaagcctcgtgttctcatagcatagagaagccatctgcagaggtttattgaggacctcctgtgaatgggtcactagcgggcctggggctgggaggagctgtgataaggattcctgtgttcagtttagtgtacgactgttattttaatttttttttttcctggagctgctgtgtctctccctcccctgggtttttgcactgctgcccctgccatgcactggcttgctttgatatttccccttagcatcatctgcatctattagctatatcttaattccactgtgttgttattattgttggctcagttttagctacaattaatggatggtcactatgtgcaagcactttccattatttaccttggccaccattattatccccggcttactgatgaatagtcggaggcataccgaggttaagttttttgcctaggatttctcagtgctgggactctgacctcagctgggttccaaaaggcatgatttaattctcattacaaatgtgggtgactggtaatctcatatgcactttgcagatgagaaaacagagcatttcttccttccttcattctccagattttgtggttgccgttgttgtttgtttaattgtttttgagagagaatctcgctctgtcgcccaggctggaatgcagtggcacgatctcagctcactgcaacctctgcctcccgggctcaggctcctgcctcagcctcccaagtagctgggaccacagatgtgtgccatcataaatggctaatgtttgtattttttgtagagatggagcttcaccatgttgcccaggctggtcttgaactcctgggctcaagcgatccgcctacctcagcctcctaaagtgctgggattacaggtgtaagccactgcacctggcccagactttgtgttttgagtgctaggtctcaggcaggcagtcagctggtccgtgggctcagagggtgtgtggtttgcccaaagccagacagccagaacttccctgtcccttacagttgcctctcaccacatgtagctgttgaacacttgaaatgtgcctggtctggcccggtgtggtggctcacacctgtaatcccagcactttgggaggccaaggtgggtggatcacctgaggtcaggagttcgagaccagcctggccaacatggtgaagctccggctctactaaaaatagaaaaattagcctggtgtggtggcaggcacctgtaatcccagctacttgggaggctgaggcaggagaatttctttcttgggaggcagaggttgaagtgagctgagatctcgtcattgcactccagcctgggcaacaagagtgaaactccatctcaaaaacaaacaaacagaaaaaatgtgctttgtccgaactgagatgtgctccaattgtaaaacacacaccagatctcaagacgtcatagtatgaaaaaaaaatgcaaaatatctccttaagaatttcaaaatattggtcacatgctgagatgataatattttagataaatggggttataggaaatagagtgttagttaatttcacctgtgtccttttacgtactgtggctactaggaaatgtaacatgacttatgtggcttacagatcttggttggatggcactggacatgtggctgaggcgaggatgtctcctgtggattctcttgtgccattctgagattgctcagaggtaccggttgttccctctgaaccaagagtgatagtgcccaggtggggaccattgatgagttggacatgtgagaagcagggagccagcacggggcatacctggaagatataaaaagtagagaggagtcacaaccacgtgaacatatttcacacctctgatctgtgcacttaaaagtggtgaggatgggccgggcgtgctggctcacacctgtaatcccagcactctgggaggccgaggcaggcggatcacttgaggtcaggagtttgagaccagcctggccaacatggagaaaccttgtctctactaaaaatacaaaaattagccaggcgtggtggtgggcacctgtagtcccagctactagggaggctgaggtgggaggatcacttgaacccgggagacggaggttgcagtgagctgagatcgcgccactgcaactccagcctgggtgacagagcgagtctccatctcaaaagaaaaaaaaaatggtgaggacagtaacttttatttaggtgtttttaccgcaataaaaaaattttttttaaatgaacaaaaacttaaggagtatgtgtctcactatgactattgtataaaagcatttaaagaatgaaaattttatttgaccataggcaattgggctaaacaaaaattgatagaatgtaagctagtcaaaataaactttgttccaagaaaaaaaaagtggagagggaggtgtgggtgggagtgggggcctgctggcagcagatcatgaaggactttcaacttctcatcgaggaatctggactttatttagacgatgaccgtaactgtctttagaaagaagactgtggggcctcagcgcgtgaaagtgctgaaagccgggagggtgggggagtgctaggggcctgtaaggaggctggccagggcagggtggtggccaggaaggaacctttcggaggagacttggcaatccatcgtaggggaggggcaaggggaaaggggatgaaccggtcgggcaacaggtggggagaaggcaggcctcagcgaggaggaacggttgtgaatgtgtgacttttgaaaggcagggagggagagtggggtgcaggctgcccaccacgtcggggtgtccagctgggattctcagcaagttccccgtcatggctggcgaggggtggttgtgcataaccagcccattgttttttggatcccgtggatctgtttgcttttagattatgtcatttgaggcttcctctctgttgttgcggagttacactctggatgattaaagatggggcagagttggaagagactgggaacagacagggctactggggaatgggagtgtctgaggatttaagaccattgggtgttcagggttttttttgccaatatatttatcagttgtgtttcaggagttaaatattttggggcataccaagatgaatcacacacggtctcaaaaaacttgtaaactgggcccttttgacacttttccaaaccaaagagacaggatgctagcattacctgttttaacaatactcatctccccttaagattcccgagttttgtgcactgtaagtgggcagcactccggagggactgagggttaattttatccttgtggataataaatgcatcttggacaaaggaagaacacatattttaactaagtagcagccttctgataagaattccagcaattgcacaagccccaccgttgtctgtacagcccagcaattctaccttgctatctcaatattctccgttttgcattcctctcttgcaggaaccagtttctagtctctcaccagcaggatacgtttccagggtgatctgcttactgaattggggctggagcccaggcgcagaggatccccgggaaagtggcttgagaactcccctgggtgggcgtgggagggtttcccagccctgcgttgggagctgccattgttttttccttagtcttgctttttgcctttgcccagcacctggttctgttagcatcgccaagatcagtcctaatgagctttgttgtttaaactggggaaggaaactttttccctcaacaaaaaggcgaattttagctcagcagcaggagggtggccagtggggagccaggggtcagaggcagttgagccctgctacataaatagcagcaattaatgggcccctgtaaaagacagggatgtgtgtgtttgctgtctagcatcgtttctctgcaaatcggagcaacactgaaattaattataaagccagcaaaggctattttctgctttctgttaaataagtattgtccacacaggagcacgttccactcggatgcatttacccacatcgtttctttggaagatggcgtgaaaccaatttattttcaaaactccccactgggtcatgctaatcaccacagttttcagcccttttatgcggaattcaggcttgggctggagccgggagccgggagccctcaggcccttgtcatttccttcattgctctgggggctttccctttgcccaccctgcccaaatcatttcctccagtgctgtcaaccaggtttgaatttttatgatgagatttacaaagcaagccattctgttattactaataaccatcataaaggtttcataaaggttctgctttggtttgctggggctagtacagtaaataacacagacctggggggccttcaacaacagacattgatgttgtctgagttctgcaggctggaaacctgagatcaaggggtcagtaggtttggtttctcctgaggcctcctctccttggctgactgaaggctgccctcccactgtgtcttcgcacagacatcctctgtattctcatccctggtgtctctctcttcgtatcaagacaccagtcctgttggattagggcatcaccctcatgtcctcatttaaccttatttccctgtttaaaggccctgtttccaaatacagccatctttctgtatctgcagggattggtttcaggatatccttttttttttttttttgagactgagtctcactccatcactcaggctggagtacaatggcgcgatctcggctcaccgcaacctctgcctcccaggttcaagtgattgttgtgcctcagcctcccaagtagctgggattacaggcatgcgccaccacgcctgactaatttttgtatttttaatagaaacggggttttgccatgttagccaggctggtctcgaactcccaacctcaggtgatctgcctgcctctgcctcccaaagtgctgggcaggatctccttctgataccagagtccaaggatgctcaagttcttgataacaaatagtgtcatatttgcatatatcctatacatatcctcctgtatattttaaatcatccccaccttacttagaatacctaatgcaatgcctacacatcacttcattcacgtggattcaacttagcacttggcatgcggcaaattcaagttttgcctattggaactttgtgaattattttccccaacatttctgatctgaggttggaacccatggaaggtcaactgtacaatcacattggggctggaattttgggggaggacacgacttagcccataacagattctgaaatagttaatagattcttcttcttccaactgcacgtggattcattcattcaagaaatactcattgagcgccgcctgtgtgcgggggctgttctggatgtggtaagcatgtcagtgagggaccatctcttcccttctggggcttctaagcgtcaggcagattccatgctcactcagttctgtgggacttcagaggtgataagtgctatggaacaaatagcctcggggcacaggggttgtgagctccagatgatgtggttataagtgggtgagtcagggaagcttctctgagagctgacatttcgtcaggatcttagaggttgagggagtgctatgtggccaagatccccaggagggaacacccctgtttctgctgctgaggaacaacgaggaggcgggtcaagccgagggagccgtgggctgcctgatgggagtggcgcaggcatcctcatgacgtggattctttcctttgggagccacggggagcctgggtgtgttttcatggtcctcacttttgggtagccttcctgtccctctagattcgctgctctggagaaggtgacagctcagacaagtttgggagagagatggggtgcctaccaaggggaccacccagaattagacattggcatgtcaggaattttaggggggcgtgtgggggctggtggtgaagaatgagggtccttctgtcatggatcgcctgctgtaatgctgcgcctgtgaggtctccccaccaccccttctccccatgtcctgtccccaattcttagtcacacttttaggaagtgagaaaccattttctgcagcaggaaaaggctggacggcaagcagggacgatagtcactgccttgggctcagcgcggatcctaaatttctgtttctgttgggactttcccagagctgctcggtctcctcgtacctactttctagcattggcatttggcgtcagttgtacggctgctgtctaccccaaattggaatctggaagaaacacctgggattggggttggccgtggccatgcatctgtccttcccccaccgttcctccctccccatcttctttccaggtccatgctggccctgttgttatccagggcatgctgatggagctccttccaggttcctgacgcggtgctggacactggacacgccaggttcagtcatttttgaaatgaccgagggtttggtgcctggaagggggttctgaaagtgttctaggaaaagaatgggcctggccttgaaaaagggtgagaaggagccaaaagggctgatcccagcaggggtctggagatgggagaatttcttgtggtgacgaaggaaaacctattgtagcctagtgagttacaggggaaaatagggttaggagattgtgaatgcctcggtcgggggaggagaggggtagagttgtaattaggctggttggggaagcctctctgagaaggggacatttctctttttttgttcgagatagggcctcactctgtctcccaggctggagtgcagtggtgtgatcacggctcactgcagcgtcaacctcccagggtcaagcccttttcccacgtcagcctctcaaggagctgggaacacaggcctgcaccaccacagctggctaagtttttgtatttgtttggtagagacggggtttcactgtgtggcccagactggtttggaactcctgggctcaagccatctgcctgggggacatttctcacacagaggtctgtcgactctgcatcacgatcgcacacaagctgaaacggtgtccacagatagcactcatatttgatttaaatgattttaatgtttgaagggaaggcactggtctgcctacattgtaattgggaaatctgagggctgaagtcgtgggatttcccaaggcagtagtagagatggccaagaacttatactggcctcctgtagtgccctggtgggattttccacacatgcattcatttattcattgattccctctttcccttgctcccatgagcccagcactgtcctagggtgctgggaggtcagacaccattcctactttcatggaaagtacagtggagggtatcatagcagctaagcgtgtgtgtgatgggtgtgacagctggagaggcccggagtgaccccagccagtctggatggggaagcaaactgtaacctgaggccagtggcgggtgggaattggggttgacctggccaagagtgtgtgggagggaattccaggctgggctgggtgggagtgggagacaggaggcagagagattagcagggaggcccaactctgcccgagggatgatggtggggctgcagcaggggagtacaggaaggaaggggaaggggagggaaattgtccaaggtggaggtgacagactcttggtgatgaatgaggtgtgggaataggggcagggtggctggaggaggatgttacagtagggccacctgtggatggttactgtaggctgagctgggagccccagagaggagttggggccgggggaggtgacaggctcggaggcccacagattatccaggtggagatggccagaggcacgtcagagctcaggaagaggtgtgagcaggacaggcattggcactcatgggcagatggacagtcatgagcgtgctggaagtggaggggtggacgcgtgcctccccagcagaggaaggcctgggatagaacctcagggaggctactgggggagaagcaggaggtgtgggacctgggagggcaagcagggtgtgagaggtcagcagggagagtagcctccgggtgccagggaccctggtgaggtagtcacagggagtagtgggagtggcagtccggggcaggggctgtctgggcttccgtgtctacccactcctctgaaccaaacacgcagagcctactgaccaccacttattgaggactctgatgaatgctctcagagccagggtttgcagcttcagaggctgtgtgcccagctgctgttgctgtgacgtccccagactggggaaggcaggaggagagtggaagaggaactgtaagacctggccctaggccgggcgcagtggctcatgcctgtaatcccagcactttgggaggccaaggcgggcggatcacctgtggtcaggagttcaagaccagcctgaccaacatggagaaaccccgtctctactaaaaatacaaaattagccgggcatggtggctcattcctgtaatctcagctactcgggaaggctgaggcaggagaatcgcttgaacccaggaggtggagattgcagtgagctgagatcttgccattgtactccagcctgggcaacaagagtgaaactctgtctcaaaaaaaaaaaaaaaaaaaaaaaaaaaaagacccggccctagcccgcagtgaatgaatgctagccctttgttcttacatttttactcttctgcagggaatcccgtagaattgtaggatgctcagatggtctattagcctgctcaggctgccacaacaaaataccatggagtgggtggcttaaaacaacagaaattcatgtttcacagtcctggagtctggaagtctgagatcaaggtgccagcggggttggtttctcccaaggctctccccttggcttctagatgactgccttctctctgtgtcctcacatgacctttctgtgcaggctcagagacagagagagttctggtgtctcttctccttcttataaggacatcggtcctactggattagagccccactctaatgacctcatttaacgttaataacctctttaaagtctctctctttaaatacagtcacgttgggggttagggcttcaacatacgcaattcagtctattgcagatggcaatcttgaaccatgacaaagaatctgaattatcctcccctccccgacaaatggtcctaaagatccaggactcttttatagtacaggttaattatctcttatctgcttgggaccagaagtgttttagatttgggatttttttttttttttttatatttgcttagtatccagtggagcacccttcattccaaatactccagtgaccattttctacaggtgtcgtgttgatgcttaacaagtttcagattttggaacatgttggattttgggttttcaggttagagattagagatgttcaacctgcatacacttatacctagaaccctggcaggtatattttaggtgtttaataaatgtttgttgaagaaggaaagattcatttgagtttagtatacagtattcattaagaaaccaaagtgttctgggaagaaagcttttttggggataatttccatatgaaaagaaaactcagttgatcagggcttcccattccctgtgcattttgattatttaaaacatggtgtaaaagtgctttgattaaggaaaggctatgaactttctaaaatacagcacattgtataatgtgtaaaacacatatgtatatttctgcgatattaaagaggagtctctttgatcagtatattttttttcttcctctcagttgtacagaagatccattttacatctgacttctcattttggagattggatacatcaatacttgatgtgtttcagagtaatgaattttaaaggcagtgaagggtgatacaggaggaagggatgaatttaaaatcctgttaactctgatcctatgtagacagtctcagctaagtcaatatttaaagaagatgagagactcgcctgataggaagtcactgccttgggatttaaaagctactctattccagagagttgaaaaccctgagatagagttcagccttcttttttaatatgctgaagccaccggtcaaggaaatgcatattgttttccttagctgaactgagcttgaatgcttattcaccctctctacgggttgattcattgaaagtaaattggtaatgataataacagcatcaatttaaggagcacttcgtatgtgccagacattgtactaagtgctttctttttttttttttttttttttttttgagacggagtctcgctctgtcgcccaggctggagtgcagcggcgcgatctcagctcactgcaagctccgcctcccgggttcatgccattctcctgcctcagcctcccgagtagctgggactacaggcacccaccaccatacccggctaattttttgtatttttagtagagacggggtttcaccatgttagccaggatggtctcgatctgctggcctcgttatccgcccgcctcggcctcccaaagtgctgggattacaggtgtgagccattgcgcccggccctaagtgctttctttatgtacattatcttagggactattggtagatggaagtgtgtgtcattaccgggtgcattactgggcctgggtgattttgagcatcccttattctaagtaaaattctacattggatttttttctcctaatacctaacaaaggccgtcaagcatggattcctcggcagtcagcaagtgacctctctcctgatgggttgggatccacacacatggcctcttcctcctgtcctgtgttggggagagcagtgcttccctttcgtgcagggcaaactcttcctcctcttcctctccttccttaaggtttcctctctctttctttttttttttttctgagatggagtcttgctctgtcacccaggctggagtgcaatggagctttcttggctcactgcaggctctgcctcccaggttcaagtgattctcctgcctcagcctcccaagtagctgggactacaggcatgcaccaccacgcccagataatttttgtatttttagtagagatggggtttcaccatgttgcccaggctggtctcaaactcctgacctcaagttatcaccagcctcagcctcccaaagtgctggggtgacaggtgtgagccaccacacccggccgggtttcctctctttctgtctctcctgcatcttgtatttcgttatctctgtagctgctgctagtgattttttggccttgggggatttccattgctttcttatgagcttagctatttatttaaaagtggtttgctgattttatccatcatcattgattggtggtgtttgtttggcagggaaggaggagggtggagttaccgtgttgtgagaaatgctttctgtttttcctttttctgagacagggtctcactctgtcgcccaggcttgagtgcagtggtgagatcataggtcactacagcctggaactcccagactcaagcgatcctctcacctcagcctcccgagcagctgggactactggcacgagccaccacgcctggttaatttttgtgagatgaggtttcgccatgttgcacaagctgctatttcttaattaataaaagaagttgatgaataatctctttcaactgtcatatattggaactgtgctcttctctttctactaattttccaccactgcaggactttgctactaatcttcttggaaatatgggggaaatctttggaaaactgattcctttgtaaaattttgaaaaggcttgcaacttggatctgttgatgagtctcggttttactgatctttgacagaaagttgtttttcttgtgctcatgatgacatccaggcttagataccctcctgaaactcccattcccaaacatacacacacacacacacacacacacacacacacacacacacacacacacacacacacacacacccctggactgaattgggagttccctggcggcattggctgggggcctcatccttaagtgaatcggggaacctgcagcgttggtaagagccattgattggtgtggtgctatcactcctgttgcctggaacatgctaaacttgcttattttactgccatttgatagcaaagatttaatttcactctgtaaaactcccccgactcaagtagtttattttgcagctagagatccattattgcattaggctttacccagttagagtcagtgttagctttgttttgcctgcaaacctctgattactgtcaaattgaattagatgtctccctttgctgatcactgattgacttttccttaatttcccattcattttttttccccatttcagttgttatagatgaagtcgattaaatggttttgtgtaatcaagaacggcattccatttcagtattatcaacttgtaagtatggagcttgtaagtcagggggtggatgaaaacaagctgataatgagctggtatttgaaaattgagagggagcttaataggaaaccttctccaaggtgaggtagcttaagggctcagggttttcatggagggaaccttgatggcagaacttgggaatcaaggtgtcagatgatggtagggcacacaccaggggtgttagtttcctgcagctgctgtaacaaatgaccacaaacttggtggcttaaaacaacagaaagtgattccctcacagtctggaggctggaagtccaaaatcagtctcattggagatcaaggtgtcagtagggccacgcttcctccagagacctaaggggagacttggactttgcttcttctcccagcccctggtggctgccatgggcatctcctgggcttgtggccatgttattctcttgtctccgtcttcactttgctttcttctctgcttgtccatctgatcccctccgtcttttaaagacatttttgatggcatttaggactcacccagttaatccaggacagcctccccatctgaagaccattaacttcatcatgtctgcagagtcccatccccctaaagatgacattttcaggttccagggattaggatgtgggcctatctttgggaggccatttttcgacttaccacactgggcctgcttcacggaaggccttggtacgacggcccaaggcctgggctggactgagtggtatgaggttgaggggctggactgagcggtatgaggaggaggggctggactgagcggtatgaggaggaggggctggactgagcggtatgaggaggaggggctggactgagcggtatgaggatgaggggctggactgagcggtatgaggaggaggggctggactgagcggtatgaggatgaggggctggactgagcggtatgaggaggaggggctggactgagcggtatgaggttgaggggctggactgagcggtatgaggaggaggggctggaatgagtggtatgaggatgaggggctggatggggtttccagggggtatttccccagcaccatagatcacctcattgccttgtcctttcaccttcaggaaagggaggaggatgggctagagaaagagcaagaagtgagagagtggggagaaatgcttggaaatactgcatttgcacagaagttggaaggtacaggaagaactgcctaaagaaaagcctagcatgcacccttaagcctggcatgtgggaaccaacaccaattgttaggatgactgtaatcgtacggctgtgataatgaggtctagattcatggaaagagccacctgggctgtcctttctgttcagagtggtctgcagtgtagacacttgctaaccaattgtggagcttcatagggtcctattttgacatagctcatggaggtgcaaaaccctgatatgggctggttcagccctgggagtggagcctgagagggagttcgtgaagactctgctctccgtgggtctcatggacgtgcgggagcagaggggacggtggagtcaatgaggaattgtcagaggctcctgagactacgctgaagggctagagtgaggaggagagagaggctgccggtgaaaggtggcgtcattccccactgccaaggagggtctctccatgcctggaaatgcgtcccaaagggcatcagatagattccttatattttcagggaagctatttgttccttgtggctgctataacaaattaccactctggtggcttaaagtaacaaattgattctctcacagttctggaggccagaagtcttaaaaagtattggcagggccacgctccctccagagactctaggggaggatccttccctgcctcttctggcttccagtggcagccaacattccttggcttgtcgcccctcaccccaatgtctgcctccttcctcctgtggctgccccctctgcttatttgtgtgaaaactccttctttctctattttataaggacacttatgaggacatttagggcctacccaggtaatctaggctaatctcatctcagaattcttcacttaataacttctgcaaagaccctttttccaaataaagtcacatgatccagagattaggccattattcaacctggtacaggcaattgaagaactcaataaggtatcttaactataattgtgtactctgttaaaaaggcagattgtattactgctgggcctttagacttgtttgtttacagtacttgtaagaatttcattgccagagggtgtaattttttagatactgccacacggagtggagcaaagacaatgcctaattgtacttttcagcattcttttttctccacctccccaagaggatggatatgaaatatgtgtgtgtctatgtgtttttggagggtaacagttaacaaagctgttagtttagcatcccttgaactacttggggccagacacagccagagtgtaactttacctcctgggggctgagagcatcagcccgagctgacttgaggtagtgcaggccccatgctgtgaggtgtggatggcaggggctcttctagcctgtctggtccccttgggggctgattgactctttgttactcccatctttggattaagggcctgaacctccctattaaaatgagactctgggctgggcacggtggctcattcctataatccccgcacttggggaggccaaggtgggcggatcacttgaggccaggagtttgagactagcctggccaacatggccaaaccctgtctctactaaaaatacaaaaattagctggatgtggtggcgggtgcctgtaatcccagctactcaggaggctgaggcaggagaattgcttgaacccgggaggcagaggttgcagggagccgccaagattgtgccactgcattccagcctgggccacagagcgagattccatctcaaaaaaaaaaaaaaaaaaaaaaaaaaaagaaggagacactgctctatagaggagataatacattatgctgtttatagccatctttgctttggtgattccattggttagtcactattagtcacttgctgtttatgaagcgctgtgtgtcgtgaagggggagtggtccctgcattaagccatgacttacatcttactgcagatgctgttgtatagggacgtagggaaggaaggtgcgggggagtctctctggtagggaggttagcctctgaaggacctggggttgggggcttgagtgggggaagggggtggctggagtacctggagagtgatagaatgcatgtcccagggagtgacaagacatgccaggagggagagctgggaggagttgggaccgggtggtggtggggctgatggagaagatgcttgggtgctcccataggcagcagtgagacctcaagagcttctgcaagaaatcagagttctagacccactgatttggaggcagagtgtagaatgaattcaagaggccaggaggagcctcaagaagaggtgacatccatgccttagttcaccctgggggtggccagacttttattgattcgttcactattttgtttaatttaaagtttgcctttagtttggactttttcccttttttgttttctttttgttttttaaggttttcttcagctttattgaggtttaactgacagataaccgcgtgtgcttatagtatgcaggttatgataagtgagcatgttgtgaaatggttaccatggtcaagctcatggacatgtccattacctgacagggttatcagttttgtgtgtgtcttgagaacattaaaaaatctctcagcaattttctttctttttttttgagatggagttttgttcttgttgcccaggctggagtgcaatggcacaatctctgctcactgcaacctctacctcccaggttcaagcgattctcctgcctcagcctcctgagtagctgggattccaggcgtccaccaccacacccagctaatttttatatttttagtagagacagggtttcgccatgttggccagactggtctcgaacccctgacctcaagtgatccacccgccttggcctcccaaagtgctgggattacaggcacaagccaccgtgcccagcctcttagcagttttctttctttttttttgagacggagttttgttcttgttgcccagtctggagtgcaatggcacaatcttgggtcactgcaacttctacctcctgggttcaagcgattctcctgcctaagcctcccgagtagctgggattccaggcatccaccaccacgcccatctaatttttgtgtttttagtagagacagggtttcaccatgttggccgggctggtcttgaactcctgacctcaagtaattcaccctcctcggcctcccaaagtgttgggattacaggcacgagccaccacgcccggcctcttagcagttttcaagtgtgcaatacattattgttaagcctggtcaccatgctgtacattggatctcagacttctgtttttttctttatcatgaactatgtccacaaaataatatttgagcccctcactgaaaacatgtattcatctgtatttatttacttattatttatttctgtacttgtacctctgtgtatggcatattgcatataatgcatattgagtgcgttgtgaaacaggtacaaaatgtaattacaaaaaagagaaataacaagaaatggaaggtccactgacttcatcctgcacccggaggctccatagctgtgtatgaaggtgttcctgggatgctcatgtctcagttcatgacagggcatctgggcactggggcagtggttggaatgaaccaggcgggtggtgtaggggaacagagaggaaggacaggtggcgagacagctggaagaagacattgacatcatgtgttgacgtcagtggctgatcacattagagaggggagtgaagaaaaaagaaggaacagggcagccggcgtggtgactcacgcctttgacgccggtgctttgggaggctgacaaggagaatcactggaagccaggagttcaagaccagcctgggccacatggggagatcggtctctacaaaaagaaaaaaattagccagccgtggtggtgtgtgcttatagtcccagctcctgggaggctgaggtgggaggatcacttaagcccaggagtttgaggcttcagtgagccatgattgcaccatgtactccagcctgggcaacagagagactctgtcaagaaggaaagaaagagaaaaagagagagatagaagaagaaagaaaggaaggaaggaaagaggaaggggagggagagagggaaggagggaggaagggagggaggaaggaaggaaggaaagaaggaaggaaggaaggaagcgagggagggagggagggagggagggaagggaaggaaaagggtgaatacaatggagaggtgacttcccctaaaggaaagaggactggggacagatgcggatttgggtggaatagacaatcttcccttccctctgttcctccatccttccttctgttcttccctccctcccaccgtacctcttatgacaagttgattgtaggggcaatggcccaggaggagcttcctgagggtagtagaaatgtgatcctgagtaacaacaaaggttgggtcctgacagtgggggccaagtttccctaggaggcaattcatcaagggaaggaggtagaccctgaggcttgagggtgtgcacagggcagggcggagcgggggcgggcaaggctaggggtgctgcatctttgggcagtgtcccccaaccatgccttggaactaagattgggggaagatttagctgtttctgaagtggctgggggtcctcagacctggagggagatgatggtgagtcctgagggggactgggacaagccctttgctggaagagaaattgttatttcatcttcccatcctgtagaaaaataaatttgacattaatcctgcactgtgccttccagacagccattcaggttttcttaggtaaattccattgtcttccttaataattggaccttttgatttttcctaatgttgtacctatatgtgtgtgtgtgtgtgtgtttgtgtggtatatgcataaatataaatgtgtatatatatattttctgttgatgctgttttaggtaaggtgtttctcctctgcagagacatagctagcatttttcttgggttcctgtgagtagccaaggcatcgctattgtctgtaatgtctgataacaggcatgttcttgttttctccttaggtggccataaaagtcattgataagaagagagccaaaaaggacacctatgtcaccaaaaacctgcggcgagagggtcagatccagcagatgatccgccaccccaatatcactcagctccttgatattttagaaacggaaaacagctactacctggtcatggagctgtgccctgggggcaacctgatgcacaagatctatgagaagaagcggctggaggagtccgaagcccgcagatacatccgacagctcatctctgccgtagagcacctgcaccgggccggggtggtccacaggtaagggccaggccacgctggtgatcgctgactgtgtgctccgtgggtggcactgggctgtggcaccctctgagcctctgagaaaggctgagcaattgcagcctgttttacaatttgtctatattttaattttatttatttgtttatttttttgagacggagttttgttcttgttgcccaggctggagtgcaatggcgcagtcatggctcactgcaacctccgccttgtgggttcaagcgattttcctgcctcagccacccaagtagctgggattacaggcacctgccacaatgcctggctaactttgttgtatttttagtagagacggggtttcaccatgttggccaggctgggaatttttctgtatttttattccatggaattgttttgtgaattgggttaatgccagtgtgagggttaaaagagtagaatctgaagccagagtgactgggcttgcaacctggctctgccctgtaacagttatgtgaccctgggcaagttacttaacctctctgagccttggtctcttaatctgtaaaatgggaataataataacacttctctctcagttggagtaaaggtcaatgagttaatatatgggaagagcttgggacagtgtttgttacctagtaggtatcaggtaagtgttagctgcttttcttcttgtttgcatagtcatgagaccagttgtttaggtgcctgaaagagccagtgttaaaatggcatgagattcgtgctagggatgatggtgctttcattgtctttgctttacacatagtagacactcaatagcagttttattcaatgaaattgaatcaccattcgaattttgaacttgcccttgaaatcaaggagtgttttccacaaaccaaaccagtcttgcaaatagttaggaaaatcaagcttgtttttaatatcctgttgtttcctaggaaggggctctacaaagaaagtgaatggaaacagcgttcttggcaatgttgccattggtagtgggtgcctgcttttagtactgtatgaaaataaaatcaaacaaatttaaagaaataaaagctccctcttttcctccaagggagtgttggcttcaccaataaatgcatggttcttcctttgtggaattatgatcaataattactctgggttattgagaacaaccagaaatatttttttttttttttgagactgagtctcgctttgtcgcccaggctggagtgcaatggcgcaatcttggctcactgcaaccacttcccaggttcaagcaattctcctgtgtcacccaccctagtagctgggattacaggcatgtgccacaacgcccggctaattttttatttttagtagagatgggctttctccatgttggtcaggctggtcttgaactcctgacctcaggtgatccgccctcctcggcctcccgaagtgctgggattacaggcgtgagccaccacgcccggcatagaaatcatttttaattggtgcttattttaaaaagcaagattgaggcatgacatatttatgtgtgtgtatatatataaacatgcacacacgtgtgcacatgtatgtttaaatatttttaaattaataaatttatatactataaaagtcaccatttaaaagtgtataatctagtgttttttagtgtattcacagagttgtgcaaccatcaccaccttctaattttagaatatttttattaccccccgcaaaagaaaccctgtacccattaccagtcactccccatttccctcttcccccagccctggcaactactaatttactttccgtgtctatggatttgcctattctggccatttcatataaatggaattatataatacccggtcttttgtgattgctttctgtcatgtagcattatgtttttcaggtttgtctaagttatagcatgtgtcagtgtctccttcctttttatgactgcataatactccatgtatggatataccacaattggctgatccatttgagttgttcccacactttggctagtaatactgctatgagcgctgttttcacttctcagaaaactccactcttaggagtggaattgctgggtcatatgtcagctttctttatccttttgaggaaatatatattttaaaaaaattcaacatttaatgataaatctaattttaattttaataatgataatctagctctatttgaaggccattattctttctttctttcctttttctttctttcttcctttctttctttctctctctctctttcttttttctttcttatttctttatttcttttttgttttttgtttttttgagatggagtctcactctgtcgcccagactggagtgcagtggcacaatctcggctcactgcaacttccgccttccgggttcaagagattctactgcctcagcttcccaagttgctgggattacaggcacgtgccatcatgcctaactattttttgtatttttagtagagatggggtttcaccatgttgcccaggctggtctcaaactcctgacctcaaatgatccaccctcctcagccacacccaaagtgctgggattacaggtgtgagccgccgtgcccagccatgaaagccatttattttcaggccgggcgcagtgctcacgcctgcaattccagcactttgggaggctgaggcaggcagatcacgaggtcaggagatcaagaccatcctggctaacacagtgaaaccccgtctctactaaaaatacaaaaaaattagctgggcatggtggcaggtgcctgtagtgccagctactctggaggctgaggcaggagaatggcatgaaccaagaaggcagagcttgcagtgagccgagatcacgccactgcactccagcctggacaacagagcgagacttgtctggaaaaaaaaaaaaagccatttattttctgatcagtgatgaaagcagctccaggcctttacttaatagaacttagacttccaaggtggagagagctgcctccttactaacgggattggtgccgtgggatgctctgccctctcatgtctaaacccaggggaggaccattgtccaggccttttctagagccagccttgggtaggcaccattcaggccaatcatttccgcctcaccaaggtgagagcacctcttcacatacgtattcttagtcatgcatgttgtcatgagatcacccttcattagaactctttgggcttagattagcaaggaagagaacattcagaaatggtaagtgaatcacgctatttttggctcttcccaacaatacccttgggtagcctgaggtgtcataacgctgctgttattaggaaaatgatagtcgtaagtgtgcctggctctgtctttgtttattaagatgacaaaggcagaaacctcacaagtgaatcagcttggatcaccgactccgcaggtcacagtggaaaatagaaccagggactgggagcggcagatctttctgtagtactcagggtgttttttccaagggttttgtgctgtcaaaaagaggatgagcaccgagcttctcaggatcgcgagaacaacaaagaaaaccaagtggaagctgtgccttgtgcactggcctctcctgcaggaaattctcaacagcccttttaaagtaattttaacaaaatccaatccctctcagcgcaattactgtcagaatgtcaaagcaatgaatttaataatgttttgatagcaaagacggtatactttttctttctctgatctccagctttttctacttttgcctctctctcctcaggaatatatttataatccaataatggcaagggctcagatcttttaaagttagagaagactggagatacagggacgatttaggaagatttttttcacttttccctctaaaaatcatgttaatgtgtgtcaccgcacacggacataggtgattaggtggttgagacctcacattaaaatgcttgtttagaatatattcatagtggctttaacggaatgtcttgactttcaaagactctataccactaattttgggtgttcgtatttcagctgaccactggtatgttctttgctggagcgctttctcataaagaattttctcctttatgctgcaaaggtggaatgaatttcataaattattttgaggttagatttttcaaatgaataagagagtattgcatttcagagaggccctggagtccctggtgggaagatttctaagtaaatacattggatgatgcaaaaggatgcaggatgattttttgtggctatatgtgtacagtgatttaaggggcttttggttgtgtgtgtgtgtgtgtttgtgtgtgtgttaggggatgctttaaaaatgcagttcctgattaggctgatattatgttattatgtcataatcaacttaatgctagcagagccctcatttcctgtggcattaaatggaaatatttatttatctttccagaactatttaaacatcatttaaaagaaacaataaatatgacaagtaggttttgttttttttttttaatacaaaggaaacttagcatgtataaagcagattcactttgctggcagagagcttcctattagattggacttgccacagcctctgtgtctagggctgttgttcatttttacaaaggtagagtgtgttctaacttctttattattctattttagaattgtctaagcttctctaaaatataacgagttgtttttccttcccctaaacgtgcttactgagcaggatgccaaaatctgatgatttgcctattgtatatagagcatcaactcttaacgtgaatcaccaagaacgccgattctgctgagaggctaatttgagattcatgtgttcattcaaaataacaaagtccaatcaaactatacagataaaacacaactgggtaatacaataccaccatccctaagcaggaagagaaaagccacggggctgcaggaccaggagaaagagacacatgatcaaagggagcccgagcctgagctcggatgtgtgtcaacaccgtggctcccagggccatgaccttatccattcatcaatatggagaaaagggctctctgcgcttaagaggaaggcagtggaagagaggaggcccttctttgttcttttgggcctgacaagaagcaggcacaacctgtgctggttagggggttaagaagttctgttaactttcaggttttcttggatttctgctcacatccaggagctgggtggaatcccagggccttctgctgagagcaagcacatatctggaggcatcagttacagcaaaagttttgtgtttaattgggtttaaaaaaatagcattggaaatgtgagctcttgcaaagctccagcccaacagcttcatggattgggatgtacagtggtccgcagtgctgatgcgaaagcctgacccccttgtccatatgctggtttgaccactcgaaagtggcgctgggcaaatcgctcaggcttttgtgcctctctttccacagctacacaacagggaaagcggattatccacttcacatggctgttgtgaggattaaataagtcaatctgcataaagcactaaaaactgagactctgtgtaaggactgagtccatgttctctgtaattactactcagtccagcccattcattttatccacgggaagctgagacccacagttctccgtgctgagggtcccacagctgttctctgcttgcactgcccttgttggctttggctgaattctactcatccttcaggtcccagctccaggctcaccttctctgggaagccctccaggcttggccccctggccatagactctcagcaccctctacttttctttctgagcacgtatcccatggttacttttctctatctgccttctgcacaggccatagcttagcccagtgctcagcccagtgggcacacagtaagactttgttgaatgaaggaaggaaaattgaatgaatacagctagtgtcagagtttgcactgggatggaagctttctggtagccagtcctatgttctggaatagtccatattctccctggaatttcaaaggagtttcttcattgacttagtgtcaatgtgtttattttttaggtcacaatttgtagagtggcatctttctagtgaatgggtctttcagttttataaacagaatttgtttctggaacattacgggaactcaataaaggtttcattttgaataaataaatcaggttcatggatgacacattattcttgtattttaccaaaatacccatattgtaaataaatcaagaatttgcacatcatttgcttttaatacagtgcttttgaagataagacctaaccaaaaaaaaaaaaaaaaaaaaaaatcatgttccctgcaaaatgcctgttgccttggggagttatgtgcttggggagtttgggatgctttattcttagtttattattaaaatccatcttgtgaccatccctgtaggcaaaactttttccatccaacttaatcctgtctgagttgggtctatccttccctgggccccttctctcttacctttcattgggctggggggcatgccccccaatactctttgcttatggccaaattaatcacctcttttaagtattttctggagtctttcctcttcaccttgtcttagaatctttcactttattatcctcacctccagcctctcacctcgtaaatggagtggcccgcaaagccctcgggaatccactgtggcatctccctctgccagtggccctgctgggtaacccttctcatgatggtcgggttccaggggagaatcagaagctccgagagtttaaatgacttgcccgggccgggttggcgggtccattagagagagccagaccccagcacctgtccttactcccttccccaggcccccttgcttggctgcctgtctttgctcagcctcctcactcggggtgttcactggttctgccacgtctcacgctctcctccccttccctcctctcctgatgcctcggtgttacaccattcagttctttggactcaaccctgagcggctcccccaggctctttcctgagttcctgcccctcagcctagacctcctgggctgggcatggtctgtggaggcccaggggagagactgccttctcccatctgccttctcccatcccacaaccctggatgcatgtgatgcatgcacgcgcgcacacacacacacgcgcgcccaccgccatatacacagggtgcacgctgacacagagctcacacgtgtgtatgcaacacgtatgtgcaaacatgtgtacattcatacacccatggatgcgtgcacatgcatgcacacacccacacacgtacactcatgctctcccccacgtgcatgcacatacgtgcacatagtcacatgaacatgtgctcacacttgcaatgtgcccacacaaactcatgtgtacttacacactcgggcgtaaacacacacacacactcctgatttccacttccccagcactgctcctgtctgcctctttgctccacagggttggagcagctgcctttctgcccccaggggtgggggatcacctgtatgtttgtcatggcaacaggaccctccctgactctcctccctcgcaccctctgtcctgaagggcagtgactcagtttatggcggccagtctcagaactttccaactgaccatcttgaaagagatgcaaggagagtctgggtgggtggctggaggggaggggaaggggttgcttggtaggctgtgggggaaccttgaatggttagtcatggcctgtttgcatgcttgtgcttttgaaagaacttcaaacaaagggctgtgattaggtgatacctagagggtgtggaggagtcttctccccttaggtcctttccggatctctgtaaaaacaccctgcacttatctcaacatctggtctgtctgctgtgatgggtcccctttgagcatttcttcctggaactgcctaatgagcagagaagggtcctgaagccttctgaacccacaccactgtctctctagtggcctcttctctgctgagctccctgctcctgcttcaccgtggcttctggttggtatatcggtgttgcctgttgttcctaagacatcccctgcacccctgcatcctcacccccagcactgtcctcaccaacccatcctcctgcgctgccttcttcctttttttttttttttttttgatacagagtcttgctcaatcccccaggctggagtgcagtggtgcaatctcggctctctgcacctccacctgccaggttcaagcgatgctcatgcctcagtctctccagcctgtagctgagactacaggcgcccatcaccacacctggctaatttttttatttttagtagagacagggtttcaccatgttgaccaggctggccttgaactcctgacctcaggtgatccacctgcctcagcttcccaaagtggttggattacaggtgtgggccaccatgcctggccctgcactaccttctgtgccttgagccacacccctttgttgcttctcctagctcctctttgaaggcccattggccaagaaaaagcaacttcccatctatcccagggccattctcttctccttcacatttgttctcagttaaaagttaacactgggccaggtacagtggttcacgcttataatcccagcactttgggaagccaaggtgggaggatcacctgaggtcaggagttcaagaccagcctggccaacatggtgaaaccccatctttactaaaaatacacaaattggccgggcgcagtggctcacgcctgtaatcctagcactttgggaggccgaggtaggtggatcacctgaggttgggagttcgacaccagcctgaccaacatggagaaaccccgtctctactaaaaacacaaaaattagctgggtgtgatggtgcatgcctgtaatcccagctactcgggaggctgaggcaggagaatcgcttgaacccaggaggcagaggctgcagtgagctgagattgtgccactgcactccagcctggggaacagagcaagactctgtctcaaaaaaaaaaaaaaaaggttaacactgaatttccagtttatatgccacagggggagctcttcagacggcaggactgaaggaagatcctcccacttccctctcccctccatgaaagaagttaatcagatcaaggaccattcacgtgaagtgggcattctacttccctcaccgcatcgtcatgtgccgaccagcctgcccttcaccttccttcccttaaagcacgtctcacacttagcagagccaaatgttttgctcttgggatggagctagagtaaacatcaggcttttcacatggaccacaaggaggttttctgatagagccagtattctggataatataggcttgctcataatttttttaaaggtccattataatacacgaatactgaggctgggcgcggtggctcactcctgtaatcccagcattttgggaggctgaggcgggcggatcacgaggtcaggagatcgagaccacggtgaaatcctgtctctactaaaaatacaaaaaattagccgggtgcggtggcgggcgcctgtagtcccagctactcaggaggctgaggcaggagaatggcatgaacccgggaagcggaacttgcagtgagctgagatcacgccactgcactctagcctgggcaacagagtgagactctgcctcaaaaaaaaaaaaaaaaaaaaatacacgaacactgaaaccttatgaagaaattcaccccttttaaaactttcaacttttatttttgcttcagggtgtacctgtgcaggtttgttacatgggtatattgcgtgatgctgaggtttggggtacagattccatcacccaggtactgtgcatagtacccaacgggtagtttttcaaccctcgtcctcctctttcccacccttctctggtagttctcagtatctgttgttcctgtctttgtgtccatatgtacccaatgttcagctcccacttacaaggaagaacatgcaatatttgattttttttttctttgttaatttgctcaggataatgacttcgagcggcatccatgttgctgcagagggcatgatttcattcttttttatggctgcatggtattccatggtacatatgtaccccgttttctttacccagtccacctttgataggcacctagtttggttacgtgtctttgcggttgtgaatagcgctgtagtgtcttttgggtagaatgattgattttcacccttttttattccagttgtctctcaatttttctgcctctttggatcatttgtgtcctctttgatcactgttgagtagctgagcagagggtctgggttgctcactgttctgaatggactcagggacataacttcagggggctaaggatgtcccacagtgaactgcctgagtgaggcacttggttgtagttgtaccattcttagtgtggattgcttaggaaagggaaatgtatccaaaagctgcttttacaaaaatctatagacaatgttttttagagcagtttcagatttacagaagacttgcatagaaactatgagagttcccgcataccttccccctactcacattttccctgttacgaatatcttgtgttcccctggcacatttgttacaatggatgaaccagcatggatacagtcgtattaactaaggtctgagtttaccttagggttcactctgtgatgtccagttctgtggattttgataaatgcacagtatcatgtaacaccactacagtaccataaagaataattttaacaccctaaaacccctctatactccacctattcatctgtccttttttccctctcacaccccaacccctggcagccactgctctttttaccatcgccatagattcccagagtgtcatacagttggagtcaaacagtatgtagccatttctgactagcttctttcaattaaaagcatgcatttgacgttcctccatgtctttccaagtgaatcacaccatttttggctcatcttatttgtttttatcactgaagataaaaagatattctgtaatatcttatctcttttttctttttcttttttattttttgagatggagtctcactctgtcgccctaggctggagcgcagtggcacaattttggctcactgcaacctccgcctcccgggttcaggcgagtagctgggattacaggtgtgtgccaccacgcctggctaatttttgtatttttagtagagacggggtttcaccattttggcctggctggtcttgaactcctgacttcaggtgatcaacccgcctcagcttcccaaagtgctgggattatgggtgtgagccaccgcgcccaaccttatttctttttatcactgaatatgccattgtttgggtgtgccaacgtttgtttatccattctgctgctgaaggacatcttgggtgcttccagtttggggaaagaatgattgaaactgctataaacatttatgtccataagttttccactcatttaggtaaatacctaggtaaaagctattttaaaaaatgagattttagtgccttttgtcctaaagtctggaagaaagtgttctctctcttcctattggataagttacaaaggacagagcaggaagtggaagtaaataaagccaaaggctattgaatgttcttttcttttgcgtgggtaagtacactgatcttttggacagagacagaagtagctcaccctcccattaactagccatggaacctttaagcagttggattggttgtcactgaaaccttttagaaatctggacaaataacccaggttaaccaggtttattctgtgcatttttcttaggggatgggagttggttataatgggatgctatgggtgggaagatagtgactttgaactgattttatttttttctcagtttgcctaataattatttttaatatgtcctgccctagttttaggacatttcctagatttgaaaagcggatatttttttttcttttgcattttctcttatttttggtctttcgtttatatcattcttctaatcactgtggttgttctctaggcttttgtggccccagaattacccaacttagttttattgttcttggcagttgctgtcttttaccttgcctctttaggatgtttttccccacagtatttgctctgaaccaaatttctcctttaatgccttagaggggcttccattcttcccaggcaaagagggcttaacttcgtttgaaacaaactgtggccttcctttagatttagagagtactgctgtttataatcagggttcacggaatcacagtttgggatattgctggcatactattttgtgtatgcatgtgtgtgtttcggaattactgtttatgcctgaatagaagtcaggctgatattacatcttcagtatcttcagaaaagaagaagtgccttacagagtccttgcaagtctctcatatgataaggacacaatttcaatcatagtattttattttcaataacaaagtactagttagagaagacacataaacctttatttggctcactgatgactttgggtgctctagaaatcactcgaggaacccagtaggaaggaaggtaaaagcatttatggggctttaataataacttctagagatacggcctcttgattgtgagagtttgagagaccagtctcaaaacagttcactgagtggttaatttatggagattttaaatgggtgtgtatgatttgggataagatttccagcaagtgcctcatatgcaaattttaaaaatactttatctcaaatatccagtcacctgaaagatcatgttacattgaaccactgcacaaggactcaaaaagtcatcctggttctgcctgtgactagtttgaataaaattgtttcatgaaatgtgacagtgtggaaacagtatttcttaaattaactatgttaaccttttaatgtatggtcttaaataggaggatgcagcttcaaagataagtagtatcaacagtcatttaataattctattgcattcctaaaaattatacatttgtgttttccaaaaaccttttactgagggacaaagtcttcctgttggaaaagcgaggatatcactgtatatttggagtcaccctatatttggacacgtgatatctttaaaaggcagacacagttttgaagtattctgtgtattgtttcatttggagtgaagggaaagtatgtaattcttcttcccattggtgggcacattggattggggaatgtctgtttatatccccagtttgaacatggatcttccttctcagccagtgcccagccttaaggctattggcaactctgaatctgttggacaccttttagagttcacctttttttctgcatttgactccttaattcttaccatcttgtagtcctgcccttcctgtgacaacagcctggctgacataacccctgcccaccccgcaactgttctttcccagtttgctgtgaatgccagtgttccccaccagcctgttgggtctttcccccgcaccacttctctgccctcaccttcacaatctcacgtcctttcaaggcttcagcatctgcccatattgaggttgaaaactggtagcctgcaaggttggggttatggttgttttaaatatgagtttgttgccaacatttaaaaattgagatcaaatccagacctctggcttcttctgtagaatgaggtgagctggcagtgttgggaccgagccgtgagtagctgtccccgttaagtggggcactgctgtcctgtttgccacagccagtcctagctatcgctcctttttgtttcagacattgacgtagtgtatcagttgccgtttttgttttaacatgattacgccattcagttccctacaatagagataagaggaaaaagaaacatttctcttgcttatctctctattcaaaagtgagaaaataaaagctggaccaagaatggtatgtttaaaaacggtggaagagaacgtgtgtttgtatgtgtgtgtttgtgtgtgtctgtgtgtgtgcgtgtgtgtaagagtgtttttacatagttaacattcaaggtatgcctgcattggcaggctacaatttaagatgccagagctgataataattgacctagatggttttgatgtccaagtacatcctttgcccacataaatacttctgcttctgaaatctcaaatgatctcatcggtaatctggattcattggtatttactgagtacctggaatgtgcaaaagtactggggtgcaatgggaagcagggtagacatgtttcctgccttctaggagcttacagtcgcaggcgcagacaccagagacacctcacactcaacatgaccctgggctcatttctcccttccacctcctcccgtcacctcagtgtcaatgcatggcatcacccattatctgattagcaatcttcattccatctggaacttaattcccttgagctctgtaaagttaacatgttctcgggtgtgacagcaggaattaggacaccaacatctttggagtccattattttgcccatgataatatctgcctgctaaatagattaacttatcatcacctgccagtttgttatgacccttgggctccaaacatggaggtcactggactcatcaattaagttggctttcatgtgttttttttttttttttttttttttttgagatggagtttcgatctcattgcccaggctggagtgcaatggtgcaatcttggctcaccacaacctctgcctcccgggtacaagcgattctcctgcctcagcctcccgagttgctggaattacaggcatgcgccgccatgcccagctgattttgtatttttagtagacacagggtttctccatgttagtcaggctggtctcgaactcgcgacctcaggtgatctgcccaccctggcctcccaaagtgctgggattataggcgtgagccaccgtgcccggcctcatgtgttgtttttttttttttttttttaaattgcttccccaaatctgatgttgctcatagtgtcaccaacccagggccacattcatatgaaatatttgcctggccgctcaggctgtgccatcttgagtgatgtgttcctctctccccacaccctggttctgcttaacttccaggttccagtttaggtcttgctttttccagaaacttttcatgatcccttctgtcctctttgctgtctgtcatgtctgaaattcttcagcttttatagtctacagcaattaattattaatatatcatgtcttttaaatatttacttgttgattgagttttggcagaaagctttatgggttggttagaagtggctctaaaaacagttcatttcccttcagaagcaaaatgtaattccattatttcgaatgcttatctgaaatgctgtgtggttttgtttatttcagagacttgaagatagagaatttgctactagatgaagacaataatatcaagctgattggtatgacttttttttttttttaagcaaaagtatcttttaagtgttgtgttgtcagttctcaactttgaaaattatccatggtctatctctaatacccagacaatattctagattatcttcttttacctccaatatttaataatggttttgaaaatgggtcatgtgtttccttgtcttattcaaactatagcttctccataaattcagatggagctgaccttttgtagaatttatttttatttggattaactggaaaacttctttaaaatagtgaaagatagtttggcttagaaatgcttcccatagcttcgccatatctcattccacttcttggtgaatgcagggatgcctaaagtaagggagaatgcaattgaccttctctttttaatacaatctttattcaggcttgttggtacaatgggagctgtgcagagaagtccccacaaagggataattagaagtctgaaccaatcagaaggaagctacaagatggggcatcataattggttcataattcatggtccatagcaaattcactgcacaactcgttttctagacgaattcaggtggttctgttgttgttattttctccctctgtggtcgctctgggcagaattcagggcatcatttttatatccagatattagatggcaccatcttttattcccctcttttcttttttctcccacctcagatgcaagtaatttcttttacctcaatggcttgaaaagactttatatgaggggaaaagagaaggatcaataggactttgtgaatttaacttttatgcccaagaaggaacttttgtttgacaaatgctgaaagtcatcacaagattctccaaaacacatcattaaaatgacttattagatattttgggattacagtcagctcccaattcagtactgggcaagaggatgcacagactctggataattaaacaccactgataggtgttgatggatacacttattactagagagttaatcgtgaagaggaaaccaatttttccccaaaagcatttagaagaatctattcttagaagattcttagataattcaaaggattttcttttcttttctctctctcttttttttttttcctgagatggagtctccctctgttgcccaggctggagtgcagtggtgcaatcttggctcactgcagcctctgcctcccgggttcaagcgattctcctgtctcagcctcccgagtagctgggattacaggcacccagcaccacgcctggctaatttttgtatttttagtagagatggggtttcaccatgttggccaggctggtctcgaactcctgatttcaggtgatctgcccgccttggtctcccaaagtgctgggattacaggcatgagccaccatgcctggctgattttctttttgttaaattgttttactattgcattttagttgtcttgaggggccaagtgcagaagctggaaaacaaggcactcgtgttgaaatgcttgcaggaagtctctctggtcctcatttccgagatctggagtgttaaacaaaggggcctcctggtgtggggtagggaatggaggaaaggagttttttgttttaggttccctgtaactgttctttggaaaatgtggaggtgacagtgatagagttgtcctaacagcaccagagactataaaagaacagactttgtaacagcagtatttatatgacaataaaagttagaataggccaggtgcagtggctcacacctgtaatcccactttgggaggccgaggagggtggatcacaaggtcaggagttcaagaccagcctgactaacatgtgaaacccccgtctctattaaaaatgcaaaaagtagccaggcgtggtagcgtgcgcctataatcccagctactcaggaggctgaggcaggagaatcgcttgaacctgggaggtggaggttgcagtgagccaagatcgtgacactgcactccagcctgggcgacagagcgagactccgtctcaaaaagactgaggctggtgagtcgtgtaaggtacagacggagtttccacatctcaggaggtgggcattgcccatcctgtttcttccctttcctcttgcccctctgtctcctctgtgcttggtctctctgctttctccttaagtggtagccctaggtgaccactgacagaactatcttgtggaataagcaatggtgaaatgcacagacctttttattggttggacgtttgctcaggggattctaggaaaaccaatcatttcactgctgcaatcggtggatgcatttataaggagctcacggattggttgagtaatagaacctcttagaggagacctgtccagtcaagtgaggaaattatacacctaaatcagagcccaccccttcccctcttgctgcatgttatggtcactctttgggtgccaggaaccattttattcaaatctctcagagtcatcacctctctgctggcaatggctgggtgggcactacaaagacattttaggtatttgggacaaaatcggctccttcagaaagcaggatgcccgcacctgctagaaagcaggcagtgaccattggatttccctttgttaaagatgccaatttggttgccagttctctactgagcagtggaaactgaggaaccctacctcatacctgccccgagagagaccttagaccacacctgagggctggtaggaactgcattttgttaagaaagaaccgcatttccggaaggcatggagggagagatgaaggcccagtgtgttgtgaggtttcttgcccctgggttgggcaatttagatcaaagatcttccaactcctgtcttttttgtaagttgaaagctctttgaaccttcttttcttcaaaggcattacctacttttttttttcaaaggtgattatagctattatgattgcctcttaatagtttctctttctttgaaagaatttggtttaaataaatctacttaagccatgtttcaaattaactagaattaccaggagtaagatgtgatttaatcaggaggttttttttccctttcaaaaaaagcagtctgatgtctggtaagtttaatcttaaaatggaagagctgcaacttaggagagttttgcacttcagtattccaaaacaggttcacttgggcgttttgtgagattcattctgtagctctcagaaaattgagtcgtcgttggttgatatatttaccaaacctaattgagacagacccatgtgacattgctgggaggtggccttctctcaagttccacaattccaattataggcagatgtgtacagttttaataatttcaattatgaatgtgaagcaaactggttgtttctctacaaatatattttaaatcaaacccttttggctagatcaacataagttgcttaacatgcagattctctctcttccacctcccagatcctctgctaagttttcttcttgaaactgtgctcaagataaggccagactgttcccaaacttgcctgggatggtggagggtgatctggcctcttatctctctctctgccctcttctgagaacaagtccttctttctggacctcaggtctcagggtggtgaggaagtgaacagatcgaggcagccctttgctgtgaagggactgctttgagattaggaacagagtcttttgctttgatctcagaagtttagagataacaatttccaggactctgatgaaattgggcctccccagctattattgtgtttatttgatggtgctgtctctcacagtaggtgctcctcacacatttgtttgttcattaacattcttttaggttcattttcaaactgaaagccgtcaaacaaccctccaatttaaagcacaatactatttttcttgtccctcccacctttctttttgagatggagtctcgttctgtctcccaggctggagtgcagtggcgcagtcttggctcactgcaacttttgcctcttgggttcaggcagttctcctgcctcagcctcccgagtagctgggacaacaggtgtgcgcctccgcgcctggctaattttgtatttttagtagagacagggtttcgccatgttgcccagggtggttttgaactattggcctcaggtgatctgcctaccttggcctcccaaagtgttgggattacaggcatgggccactgtccccggcagatttttcttcttataaaaatattcacccccttttcttcccgtttcagtgatcctgaggggtggggtctgagaacagggtttctcaggttctttttaactgatatctcctcctaaggtgggaatccagagacagtcccacacccatgactcctgaaggacttatctgggacagggtttgtggggtctatgggtctggctgggttgatgggaaaggaaatggggtgtggggggagggttggggagggaagagtaagggagtcaaggaggagaaggggagggaggttaagggagaaatatggaatcataaaaaaacaaaagaagagctcagtgtttggacatgcagcatgcctggttggtttgcttgccattccctcttatagtttgggctgaagagtctgggtgatatttagagtcttcaagagttttctgagctctgcttagatgagattctttttagaaaagcttaacgcaatgacttttggaaaacattttggctgtgacatcttgatccatggtgtgcaattaacttcacagactggactgtatttctccttccctgagatttcctacaacgttcctaatggtcatgtgccttgcaggtggagacatgttagagtgaggtgagaatacattcgtgaaactggacataaatactgccgattgagaaagtgcgagagttttgttcaagactggaagcctgtctctgcctgagccctgcagcccgagtcttctgtttgtgggggatggaccataatatttacattgaagttcaaaggatgagctgcgatcttaattctgagatcaacaaagattaaggaaagattcagatgagggcataacagtaacagctctttaattacctgtcagtttcagtatctttaagatcaaaagataaacatggcgcagaaggcataatagacccaaagtcactcgatgcagtgggctttctcccccctcttcctgggcatcttaatcatccaggaacaaagcagtgccatgaggtcgcttagtctagtttgcattgccatctttctggtgctacttttccagccagcattcagggttgtttaaactgttgggtgtatttttcccctcttcaagtcactatatgtgctgcataacttagggggaatttttaaaagactttcatgaaacgaaaacattcagctgaaaaagtcaactgtaagtggctggattgcatgtcactgagggtgacacaggcagccagagagaatcaatcttccctcatcttttccccacttggcagcttgggagctaactcaaatcccctctgcttgttctttcttcctgccttcatcctagaaagcgaattctctctttttttcctggatgactcatttacaagattggatggaaataggttttagttcagcatactgtttgctctaactggctttaacagtgaggcccgatgtcaaatgctctcagctaagccagggaattcttttgccttgagtctcgtatccagacgttatggtttgcagctgctacagttttctttaggatgctaaatgatgtgttagcctgagagaatgtttcctttcctgctgccctttttatttttccttttgttcctccctcttcatttccgcagttttctaattcggagcttgttttgttcacctctctttgcagactttggtttgagcaactgcgcagggatcctgggttactcggatccgttcagcacacagtgtggcagccctgcctacgctgcacctgaactgctcgccaggaagaaatacggccccaaaatcgatgtctggtccatgtgagttatcaagcttctgaaagtcagtgttcctcctgctgtctccaccgtgccttccttatgaaatcatgcctgagtattggatggcatgtataggtgacaggcccaggagtatgtcatcagggattctttggggcctggctttccatctctgttccttctgtttttttctgcacaaactgtcagagtggcctttaccaaaattcactgcggtgctgagaagagaagaaaaccacgtcctgccctcacagagctcacattctggctctgcgactcatttatgccccatcctcctgcccttagcttcccatcgccctctgtgtgaagctccatcctgctgcctggcctgtgctccttgcgggacttgctcgcccatctctcctaccccctgtcctgctcacagttcttcagacatattgacctcccttttgtcgctcccacctctgggcttgtttttttttgaggcagagtctttctctgtcgcccaggctagagtgcagtcgtgtgatctcagctcactgcaacctccccttcccaggttcaagtgattaccctgcctcagcctcccaagtagctgagattacaggcatgcaccaccatgcccagctaatttttgtatttttagtggagacgaagtttcaccatgttggccaggctggtctcaaactcctgacctcaggtgaaccacccgcctcggcctcccaaagtgctggcattaccggcatgagccacgcgcccggccgttcactggtgatgcctggaatgtcctttcccagctctttggatggcctgcggattcccacatcccattctcaagccagtggcacctgcacattcccacatcccattctcaagccagtggcgcctgcgcattcccacatcccaggctcaagccagtggcgcctgcgcattcccatatcccagtctcaaaccagtggcgcctatgcattcccacagcccattctcaagccattggcgcctgcgcattcccacatcccaggctcaagccagtggcgcctgcgcattcccacatcccagtctcaagccagtggcgcctgcgcattcccacatcccagtctcaagccagtggcgcctgcgcattcccacatcccgggctcaagccagtggcgcctgcgcattcccacatcccggtctcaagccagtggcgcctgcgcattcccacatcccagtctcaagccagtggcgcctgcgcattcccacatcccattctcaagccaatggcgtcactgccgagatcatttctgagctccctgccagggagtcccccgtactctgtcctcacccttttaatttcgttctcggcacctctcaatgcctgtccttttcctgttttaaatccattcctctcctgtctccccagccagcaaggactctgcacgaagggagggaattggttggtctggttcaccattttgttcccagggtctggtacaggaagggccaccaggggtaagcacaataaatatttggaggatgaatcctcagttgcaccaaaggtagagcctgggtcccccatggtcacagtgagtcaccccctccaccatcccctgtcagtgatggtacagggtcagttcagagtcttggattcttggataggactcaatcctttgccatagggaaatgggctgtagagagagtgaggttctgattaagatatagacgagaaagactcgtttgcgtgaagggtgtgttgatccggagtatttctggaattcccctgcatctcttcatattcactgtaacccccttgtccaggttggcagaaaagctaacgcttacttagtgcttgatgtgtgccagacaccatgtcacttagtttcacaatgacccagtgcaatcattactctctattaccctattttatggaagaagaaacccatcataagagaaatgaataaaatcgcccaaggtcatagagctgctaagtggtagagtgggatttgaaccaagcagtgtcctttcagggtctcaagatacagccccagctctccaacgtggcgtgtggggacccttgcttgccctgtggcctcgctgaaggcatgcccgctcccctcctctccccatccattctctggctaacctggcattgtttcctattccctgaacacagcctgctcctgctacattccagcccttacatgcacagttccttcggcctggaaccctctctttttccctcttgtgttgttgggtgcaggttcctctgggcagccctctgtgtctccagctggctggctttgaggccctcccatgtaccctccagtgcctggctatctgtgttcctgggcctcaccgtgaggtctcagtccacctgctggaaccctctgggctgtagctgagggggcagggaccacttggctcactcccaggatttcctcagcacctggtggaacttggaggaagggagggaggagaaaaaggaggtgggaaggaggagagaggaaggagaaaggaaaggaaggacggagggagggaggaaggaagagaaaagggaaagagggacaggaggaaggagcaggcatttcatccagggaaacagaagctggaaggtcagggctgaagctggctgagaaagcaagcagaggaatgtgggtcagctcaaggctctagaagcgagatgagctcaggatgttccggttggagattgagaagaaacagaccagaatgagatgtggagagataaagaattcctggaactttcccagaaggggccgactcttctggaaccctggctaagaggacctgcttgtcagcgaggaggtgaaacacgtcaggaatcagctgctgctcctgagcgggctgggtgccctggttagtcacccctgaacctcaggacagtcctgtgagacacatctcttgcccccagtttgcacggatagaagagagtggtgagcactgcctagaggcacacacgagcccgaatgtagtggagccacactttgctgaaggctgggctcccagttactttgcaggtgtggtctggtgtgcaggctgcatatggggtgtgtgtggtgtgctgatgacgggcccaggtgggctggggtcatgtggagctagtggaatggagcagggagcagcagaggatgccttctcttctagggcattgctagtcatagacttcacttctgagaaggcctctgaatccccctcaacacagcccctcccggcagctaatgccagtggatcagagttgtatatgggaggaaatccattatggatttcttccaacccttaagaactctcaaaggtgtctggcacactgtcttccctcaataaatatgtattgagtggatgaatatgaatatgtgggtctataatcactttcttaacagttagagaagtcatttatgctaaatgggaagctatgagaggaagaatttgtgcacacacacacacacacacgcacacaaaagcacaaaaggctatgggagcctgaaagaccaagaggtcccctgtcttagtctgtcttttgttgctgcaagggaatacctgaggctgggtcattcataaggaaaagagctctatttggctcatggttctgcaggctgtacaagaagcatggtggcagcatcggcttctggtgaggccccaggccgcttccactcatggtgggaggtgcgggggaccagtgtgtgcagagatcacatggtgggagaggaagcaagagagaggggaggtgccaggctctttgtaatgatcagcatgtattgactcatcctatctgcctaacaacccttcaaggtagtgctgtattactcccaatttaaaggtgtggaaactgaggcatgaaagacctcagccacttgcccccatgacacagccagcgtgtgacagagccacgatttgacctacgtggtttgccctaggcccctgaatcaccaccctctactgcatctgtgatgttgtacttcctctggtggggtttacatgctagtgggacaaacagctggtattttaaaatgctataaactgagtgtggtaatggctgtggaggaagtgagagggattcagggaacaagatggagtggcctcttgaggagatgacttcaaagccagatcctaagaatgagaaggaaccagctatgggaagaggaaggtgtcagggaagaaggccaggaaaggtcaaaagtaaactggtgagaaaaaaaaccagattcttttgttatggcaaccctagcacatatggctgcacagctgggttaagtcaggaaggcatctgtagtcaagtatgatctgttcctcaaagatgagtggagacggccaggtggagaacaggtggggaaacgttccaggcagagggaacagcatatgcaaaaggctggtaggtgtgacacatctgatttctcttcctcttaattttggcgaaaacataaaacttcagcaccttttaagagatgaatttcctactgctttggggtctgagcaaactttctatctgtctaaacttggggtctgattttgtgtctgagatacaagttaggtttctgtttggtgcccatgactttgctggcagaagtggaaatggaaaaccaaaattgaatttaatgtagaaggctgtttaaaatgagagtgaaaatggaaccgattttcttgctgggttagacactgttattataaaatggcttctctctttatggctcagaaacaaaaacagaatgaagagttcacttccaaaaaagcaaactcccctccctggaggctttggacctgatggatggcagagactttatccacaacttctgagatagatttaggaagaaaatcagcctgtcattgaaagaaaccttgggaaagaaagctcttccctacaaatagggcccccaggaccctccgctagtgaagccataattaacaatggaaatgggaaatggcgcgctttcttgggggtttgtatttcttgggggttttccattattttcaatggtggttattttcaagaccgtaaagaatagctgtaaaataattcacttctttcctttaccccagattatatgtataaatatatatatatatataaaaataacatatagatgtgtgtgtctccaatgaactttgaggtttcagacacaaaaaccaaaaatattcattctggtgcattgaacttttattactgtgaattgacttttcctcagagtgacatatatgctaatttataacaactttaatgcagatgtgctttttaattgaaaagaatcaaaattaactttatcttcagaatattacaatactcatgtgcaaccttcagtgaatccctactggtaaggaaaacagaaattgagagttctataccgagaagattgagaatgcaacgttgttggactaaagctgtcctttgctctcatgggggtccctgggatggatgggtgaagtatttgcgtgagggcctggtgcctcctggagagtcacacacaacacactcagtccaccttcctagctcagtgaatctgttttcacatagtggaaaaaaaaatccctgtctccagtgctgtacctgtgggtggacaactcggccaagaggcaccatgtctccaaatagctctcctgtctccatatagaactgggtgttcaggagggagagtgagagaatttgttctaggcctcagactcagtgttttgtaaaagtactaccagatatcatcagctactggcaggggtcaaatacagaaggatggtattagtgttttctctgtgttgagaccctctcaaaatgaaggctagcaggaggcagtgggaagagtaaagctatgactcctttggggaaccttaggccttttgacttttgagagagaggtttcccttagcttctgagattattcagttataaagtacgagattttttttttatagctagcatgtatatttaacatagagtaaaggaaggaaggaaaggaaaagaaacaaccattttgaaatccgcaagaaaataatttcttgctaaacatagaccatttaatggaacagtggtgagatctgagattttccaaatggatgaattggttcctagtctactttcttttttttttttcctagtctactttcaaggccttaaattggaagttatattattaaaagttgatactgaaagatggaaagatattgctttcaggtggaagttatttttaatttttccaaggcatttcctttcttggagagccacacagaagcaaggtgcatctcccgaaggtcctcttggctgcactctgtgtaaactgggcagtttccgaggctcctgtccacatgccccttaagaacgagtaatcagaccttccctccacctgccggggtggctctgtccattgctttgtcccttgcatcttgttaaaattgccagcgacttctccagggagcagtgactccatgtctttcctctttgggatggcaggtgataccacaacttttcctccagggagtatttttttttgtgtaccagactaaatatcaggatggccatttggcttttgacttaactccaagctttcccgtttgtatttcataagtaagggcccttttcctcttctttcagctgccgcccccaccccccacccagtgtctgcctttcttcctcttttgagatcagagtattctatgctgcctagtatctttgggttttcttctgtcctgcgatagctcatccttatttcattctgctggaaaaacccctggtcgtatttgattgttgccctctcttgtcccagtctctcatccctctcatttgttaagactgtctttgattcttgggaatcccatgtctgccacggagaatccagaaagcccctgggccatatttcaaaagacccatcaggaaattctgaacatgttttgaaactcctactaattctatgggattacagaggtttataaactgcattccacatttttcccttggtatcctcacatacttctgaaatgtcagatggactaggtttctctttatccagatattaaacatgtatggaaactccgggggagaggaattaagatgcttaatctggtttccctttttaaaatctcctagctaggagtgtttgactgttcacataggtttccattcttttttttttttttttgggatggagtttcgctcttgttgcccaggcaatggcgcaatctctgcttaccacaacctccaactcccgggttcaagagattctcctgcctcagcctccaaagtagctgggaatataggcatgcaccgccaagcccagctcattatgtatttttagtagagatggggtttctccatgttggtcaggctggtgtcgaacttctgacctctggtgatccgcccacctcagcctcctgaaatgctgggattacaggcgtgagccactgtgcccggccaggtttccactcttatttggcaatacagtacaaataaaactgtagctttttccctcttattttaagaaaggttttttgatgaaacaatagatcacaatttatcaagcttaatttattccaactacagaattcaggtctttctgtggcttagttgatgtgagcctcatacgatctgagaggtaggtactattattatccacatcttatggatgagagaccctaggatgagagaggtgggtcctctttaaggatttgtgacaattttttttttcattgatgataaattcctccaaaagaaatggaattctggaatcagtttgtaaagtcatcaattaaagttactacaaaaactgcttgctcaaccctgaccagacctgccacctggatggctctggcgccatcttgaagacaagcatctgttaatcttatctgtggtcccagccagatgatggagagaggcaaagaccagtgtaatatgcagtgacttgaggagatttttggcgtctgttgaagccagttggtgacaagaaggcaagcagtttggtgtctcagggtctccttcaagaaagaaacattcataaaggctttagagttgctcctctggcctcatatggtctccaaacccctttagtggggttgtcctcccattatcatgatgtcctacttcctagaggcatctgcactatacgacacccccacctgggacaggaagctaggtgtgccgtaaagattaaagggaatataaaaggtcgtagagcagtggtctgcacatttgagtattatacactgtgtttttaaaggaagaacgttctcgataactgtgtgtgttgacgtgagttatttttatttaaatgttagttataagtacatgagccccaaatcaaactccttttatttatggccctgtacaactgaaaaaccaaaactcatttacaggttaaatagaaccaagagtaaaagaaccccagaatattcaaattagcaacgttaatgcaatggctaatgttttgtgggaagggaatggctgtacacagcatgagtgcagttctcactgctgggcacaggttctttgagcttgtcaggcccatcttgtgatgccacacctcccctaaaacttttcattcttccagggctttccaattttttgagtacgcatcagaagcacctggagggcttgcaaaaacactgcagagtttctgattccggagatgtgcagtggcatccaggaatgtgcgttttctttctttttcttttctttttttttaagagtcagggtcttgctctgttgcccaagctggagtgcagtggcacacttacatctcactgcagccccaacctcctgggctcaagtgatcctcacacctcagccccccaagtagttgggacttacaggcgcatgccaccatgcctggctaattttggtattttttgtagaaatggggtctcaccatgttgcccgcccaggctgatctcgaactcctgagctcaagagagccacccgcctcagcctcccaaattgctggaattacaggtgtgagccattgcgcctggctgaatgtgcattttcaacaagttctcaggtagtgctgatgccactggtctgaggacgaaccacacgctattccagtcaccaggagactttccactgacagaagcacagatgcatcactgacacattaagtccacctctgcttccttctcattaggctatgacaataaaagtgatttttttttttttggcaaaaatagtgcattgataaagaaataccaaagcagggccgggcgcggtgctcacgcctgtaatcccagcactttgggagaccgagacgggtggatcacgaggtcaggagatcgagaccatcctggctaacacagtgaaaccccgtctctacgaaaaaaaaaaaaaaaatagccaggcctggtggcaggcgcctgtagtcccagctactcgggaggctgaggcaggagaatggcgtgaacccgggaggcagagcttgcagtgagccgagatcgcgccactctactccagcctgggcgatggagcgagactccgtctcaaaaaagaaaaagaaataccaaggcagacactgaaattgggtgtgtgtggtggaaggtgttcttagttatatggtggtcatccaatgcctctggttatgctttgtgaaatgttttagtcaattaccaaaaagaaaataaaaattagaactgttgcacccgtgaggatgtgtctgtgtacctcagtttgagaaacactgaatgagttaggcattatgaagcacttactgcggaaaaaaatgatattgtataagtagcaggctcttcagctttaggtgtgaatgttagagccaagattaggcactcagaggtggtgagcagggacagaatcttggttttgttttttcctccccttaactcaattcactccaactctgttgaaatatgaggtctttgctatgtagcatggaaacattgaagctcattaactgcatgaacctgctggtgtatattcagggcagaggactgggttgttgaggagactctcaatcatgtcaaataaagcacaggcaaaagacctgaggtcccagcctggggaagacccagaaaggtgggaagatcctggttccagttttcaaagatgtgaagtgctgatcatggaagagcaactggtcttgttccacaaccaatgaatagaagatgtagacattggcttagccttggaaagctttatttttgcatagaatcgccctggatggaacaggctggctcagaagcattgggaacagcttgtctcagaggctgttcagtggtccccagcaacaactttgtgggatgtgccagaaggtttccatccataaaagcgatgtgtccaagtcctctttgtatgcaaaactctacaattttgggacccttttagcattccttcttaccgatctccaagaatttttcgaagcaagagtgtttagctctacctcaaacatactcaaagtgcagcatcgcatagtacgttctcaaatatatcactagccctgatactccttccctgcacccctaacctgtctctcctcctcagcctcctcagtaccattctgttaccaccattggtcctgcattctgagtttgccacctggcacgtgcccttcaaatgtctccactgcgtctttgcctttccctttctgttgcgtgccatcattccgattccgattttaacagcaacctgctgatttcctgccatagtttcctactttccattctgagcccctttaatccacttatacaatataactactccctgaattatttggtcataccacttgtatctgccgaacccctattcctcccctggggtacgttttccactaaacacacacagggaaatgccacccaaatagctctatgtgtgccttgttcattcttgtttccatttctttgtttatgcactttttatctctccatccatacaaccagccagccaaagacacatgagctcacacacatgcagtcactacctgtgtggcatgttccctcttcatgtacctgtttctaagttctcagtctcccttcattgcactcctcttgtggtcaaaagtggtgcaattcagcattttcttattccttttgcactcatcaccgcttgaaaggactgtgctcatctatttgtttgcacgttgcttgcctgtcttcttccccactcaaaacccaagagggcaggtctttctctggtccccagtacccagcacctatagtcttgcctggggcagagagccatccagcaagtatttgtggaatggatgtttatgcatctgtccccctaactccactgtgagtttggaactaactccactgtgagtgggaaccaggtcttactatatgtctgaaatttgcgaatgatttctagtgggagcggtgggctccagtacctgtcattatctgaaatgccataattcagaggtgcctctgtggaattgggcctcgagggtcttaatttcaatcagtctcattggatttgttttgactagaaatcttagtgcctgtttttaaagtatattcccttgggcgcttttgaacacttgagacctcttggtaggcaggcatttcatcctcatcaggaaatctcatcaaaatgatattagatttacacatcaggaaaataaagatcctctaagaagatgtttctattctgtagattggctttggataggtgcagttaagcttactcagaaggtatttcaaccacatctgagatgttgggttggggccaggtggcagaatctcacaataaacaataaaaaaatcagggcaggaaggaaggggacctccccagaaatttctgtagttacaagccaaggcaaaatttaagagtagagcaaaacgccaggttttgttatgaggcttcgtttctgagggctgagtggtaacctggctcacagtttggctgtgactggagcttccactgtagggggcttttcctgtattgtttggtcagccttttccaggtaccaccttgtaagccatccttggaaaaccacataatggcagtactactcttaattgaagtccctgatgtctcccaggtgtttcttacattgcttggtctgggcctccttgttgttgacttcttcctgccataacattcggagagagcagagggccatggttcccctcctcaggaggtggctcctgatgctcttgaaactcctgcttttctctgtggtccccttccgggtcttcacattcaagtgctctcacccaagactttctttctttctttctttctttttttttgagacggaatttcactcttgacgctcaggctggagtgcaatggcgtgatcttggctcagtgcaacctccgcctcctgggttcaagtgattctcctgcctcagcctccccagtagctgggattacaggcgcccgccaccacgcctggctaatttttgtatttttagtagagatgggtgccagggtgtgcgggggcttcatgcacagcttgtagcacagcagcgagatagtggtccaggctgatgaggcagagattgaggatggaggtgctacacaggctggtctcgaactcctgacctcagatgatccacctcccaaagtgctgggattacaggcatgagccaccatgtccgacctcacccaactctttcaacatgacactgagcattctacaaagatgactttgaagagggcctgttgaggttggcatggaagcagcagctcccacgcttcggtgaagcccgtgtccccagtcttcccctccccaggggacctgactccgctttcatgtgtatgtctctcttttcagaggtgtgaacatgtatgccatgttgaccgggacgctgcctttcacggtggagcctttcagcctgagggctttgtaccagaagatggtagacaaagaaatgaaccccctccccactcagctctccacaggtaatgcaccagctgctctagatcacggttcaggactgctgtcgtgaccagttcgggtctacctgtgaaacagtatttgttttgcagtaatggtgttatgtctatcccatggttataagtttctttctagtgttaaatagaagtgtcaaggggtggttgggtttcccgtctctcaatggccactcatgcctttcacctgtatcctttcctgttctgttctatctgaacccctaacttctccttcctccttctgcacaaaacacgtagatccaaaggatctgatattctccatttaaaaaatgattgcaggcttgattgttttaaaactcaccatcttatgatgctgacttggaaaagagggtttatggtcgcatttccaatatggcttctttctgcaattactgtcaagaaatgtttgttgcattcaagttggggctgtgatttgttttgtgagttgaggttttgagcccgttcaaaagcttttaaatatatagaggttaagttacttgattggactgaatcatcaggtgtgtttgaaaagttctctcaagctttagctggttcacatttcagtaaacagtttgtattaaggtttggtttcagatccagtaaatcagtacaatttgttcttttgtttggttcacaattcaagtcctggccttggcttggctttgatgagcatttaattggctccttagaataaactcagcttcactaagataaggcttttgaccaaagaagaaagcagttatttaactgcaacttatgatacttagcgatagttaaaatatagcattttattttactactgttatgcatttttcttctgagtttaaaagcatgcatgaagctgcccctgaatttatcttggcaagtggaatccaagtggagacacgttcttgtatgcaattatctaattcagcccatactgtcacctcaagggaggggagactctctggaggcttgaaagcaaaggaggcattaagtccttgggaagatgagttacagctctgtcattatacaagaaatatttctgcactgagagtcataactcttggagttagaaaatgtgcaaaatgtcaaaccaattgtcatatttaagttttagagctttcagaaatgttgaaagtgcggcagagcactctgaggtgtgcccattcattcattcattccatatttcatactcattagcttattccgtgaatatgtgttgtgcaccaattatgtgctaggtgtgttctagattaagcaagacagagaacaaaccagtctctacccttataaagcttatatatcagcaggggaagctaaaaataaataaatgggtaataaacatgtgtggtatttggtaatgttaagtgctctaaagaaagtaaaataaattgggacaaggggatagagagtaaaaaggtttttttttttttaacaaataagattattttaaaaacttttcattgtgatgtaattgtagatgcacacacaattgctagaaataatacaaagagatccaaacagccttcatctggtgtactagtccattctcatgctgctaataaagacatacccgagactgggtaatttataaaggaaagaggtttaatagactcacagttccacatggctggggaggcctcataatcatggtggaatatgaaggaagagcaaagggacatcttagatggtggcagggaagagcgcttgtgcaggggaaatcctatttataaaaccatcagatctcgtgagacttattcactaccatgagaacagcatgaactgcctccatgattcaattatctccacctggccccgcccttgacatgtggggattattacaattcaaggtgagatttgggttgggacacagccaaaccatatcacccagtttcccccaatagtaatatattgtataactgtggtataatatcaccactgggaaattaacattgataaaacccattgaccttgttcagatttcacaagttttatgtacaatcttgtgtgttgctgtatattagttctatagagttttttcacatgagtaatttgtgtgacagccaccacagtcaagatgcaagacagttccctcacaaggatccctcgtgctgctcctctgtagccacagctaccttccttcctcctgctctccctaagccctgtcagccactaccctgtatcatctataattttgtcatttcaaaaatgctatatgtaaatcactttttttcccactcagcataattcccttgagataatctgagctgttttttttttattggtgagtagtatctcctggtgtggatataccgcagtttgtttcaccatttacccactgaaggaccgttgagttgtttccagtttggggctatcatgaataaagatgctgtaaacattcatgtttaagtttttctgagaatatggtttcatttctctgggacaaatgcctaagagtgaaattgctgggttgggtagtaagcacgtatttagttttgtaagaaactgccaagcctctttttcagagtggctggaccattttgcattcccactagcaatatgtgcatgatctctgcatccttgccagcatttgatgctattattattttttattttagttgttctgataggggtctaataatatctcattgcagtacaaataagatgtgatgtttccaaatagatgcagtctttcaaagcagtctctgtaggggttatatagtcataaatattgccatctctcagagtgattccaaagtttctttgagggttcagagcctgttttattcaagtgacccataacaaaggacaaaaggaggatgaatgtacccccacagtggggaaaggcagacagtgctctctttgaacccgatgacagcctgaggagctggagaactgctgatctgctgccatttcattgtattagtcagaatagaccaggttatgctgcagtaacaatcagcccccaagtcttagtggctcaggaccacaaaggtttatttctcagtcatgctacatctcagttgagagctggatcaaacattgaaaggttctgcccagccaagggcccaaggctgatggagcagccaccacttccaacatttctggttcatgcagagggagaaagggaaagagaaagagaagttctttcgccagcaattaaatcttccaccaatcttccagttgtaagtggaagctttctaaaacatggcatgcggcttcacccaactaaagagaatggggcagtgcaaccttaccatgtgcgttgaaagtgaaaagccagaaatatttgttgattagcattagcatgagccccacacagctgtgggaaaaggagcagacaagcgcaggtaggttagtaacacaagaaaatcaatctcattgcttcagaaccataccttgtttttactttcaataacatcacgcagtcttagcaggctgggctctaagtgttttttgtgaaaattaaatttaaccttaaagaagcaggagttgcagttctgaagatgttaaaaaatggtccaaagttagtcccaaaggagacatattaaaaatgttcccagcaatttcagcatcactggaattgctgtccaacctcgcatagctcctgcattgagcagacagctttgccttggccttaagctctgtgtgtgcttgttaaagatcttcacattcctacaggactttgttgtcttcacttgtcaagcatgaattgcatttctatatctgattttctaattagggaatctgatgctctccccatctcctcctttttaaaataactattgggatatagaaatatcttttttcaactaggattgaaatcctttgagccaggtgtcaagtgaggtgtttgcacatgatagacactcagggaatctaggttgctgactctggtgttaatgtgtctgtgtgacctggaaaggtggcccatagattattttgattactcaggattgggaattgtcctgacccagtagggcccagagcagtgcaccagctgctgaggcagcccagggcatcttatctggttcatagagtgaatgtcttcaggtttgaggatcagctgctgcccttctgacagcctcccattttttcaatcctttgcaccccgctaagtttatctcctctcccttccaaccagcctggccctgcttatatccaaaaatactagtttaccagtaacatgagtagctgccacttattgaataatcctttgtaggtgtttttcatgtggtgttgtttttatacaatcctgcaaggtaagtccctgtttaccagtgaggaaattgagtctcagagagattaagtctgcttgactgaaaacctagattttcctaccatgctgtgttatttcactcttctctgattttatttagtataagacgcaccccccctacaaaaagttggaggtattatctattgtctctatgaccttatgttttgagtaatgtcaatccaaatagaaaatatgccagttttattgtgtctcactaatgcacatctttattaattggatgactctgtcattcatatttgtttttgtttttgtttaagacaaggtttcactgtgtcatcctggctggagtgcagtggcacaatcatggctcactgcagcctcggcctccgaaaccaagcagtcttcccgcctcagcctcccaagtagctgggactgcaggcgcatgccaccatgcccagctaattttttttggtggggggtatattttttatagagagagggtctccctatgttgctcaagctggtcttgaactcctgggctcaagcaatcctcctgcgtcggactctcaaactgctggggtactgcacctggccctgtcactcatatatgtaatgatcatatctattaattcttcggctctttttaaagattaagttggaagaatttttaccaaacttgagttgaaaacagcattattgcccttgtgaatccacagaacatgcttccaaagaactgcccttcattcatctctgtcatgccgtttgcaaacttaagcttcgagggcctttctaagtctctcttctacacactttctttttgcttgttggcacttgtatgtcacagagtagcgaatgccttttatggctgagcagtttttcagactgttaccttttcatcactacacctcaacactagcatttataatacattccaagcagtcacttcaggttatgatggttttgtgctgtgaattctccaaagtcaaactggaggagaagcgttagcttttatgagggttgagtcagtgctaattacgatgtccaagaaggcacaatgatcagattatcaaataattttttagcttgggaagtgatgaggagggagcttcaagtggggaggggtctctatttgcatctatcaggctacactaatgtgaaaagtctgatgacagacctgcagccctttcacttggtacagtgttcaggtgctcacacaagccagtccagactttggaaagctgatggttcatgaaagaaagtggggtttgcgatggaggaaggtgttctgtgtgttacgttgagcagggtggtactatttttccaggcttcagtggagaacctaagtgttatctcagaggggtggagggtggcgtgtggcctgtggccatgcctggcatggctttccaggatggtgaggaatattttaatctcttttgcccataaggcaggggttttcaggaccctaaaacaaacttcaaagagctctaaggacttctcaaagtcctttttggatagtaatgcaatgtctgtgacgtccaaaggaagaaaattcgtcagcggagatttgaactaaaattacttgtgctcatcagcagtttttgaagatgcagagcgctcggttatgaaaatagaacaaaaatgcacatctagtttgtccttagcacttctggttcatcatactttgaaaaagcctggcctgttgcccaagtcttttgaggcaaccctgggttgttgcccaagtcctttgagggtaagcaacagcaatgtctcagaaaacattaactcaacagcccacccgctccaattcattaagccctcatcttttttatctgaccaatagatgcccccagttaagatctaaatgactcttccaatgcagggttgttaaaggaagggagatagacattctgaaaagcagagatctgtttgattttcgggttattatagaacatggatggagctggaggccatcatccttagcaaactaacacgggaacagaaaaccaaataccgcatgttctcacttagaagtgggagctaagtaatgagaactcatggacacaaagaggggaacaatagacactggggcccacttgagggtggagggtggaaggagagagaggagcaaaaaaaaaaaaaacctattgggtaccaggattagtacctgggtgatgaaataatctgtacaacaaactcccatgacatgagtttacctatataacaaacctgcacatgtacccccgaacctaaagtaaaagttaaaaaaaaattttttttaaagtacgttgctggaaagttttagctgagtatccagcgataacacttacagtggtaaatgtacctcatggcctctacacatgcatttctacccacctcactgttctttgtttttctttttttttttttttttttaattttgagacggattctctctctcttacccaggctggagtgcaatggcgtgatctcagctcactgcaaactctgcctcctgagttcaagcaattctaccacctccgcctcccgagtagctgggattacaggcatgcaccaccacacccggctaatttttgtatttttagtagagacggggtttcgccatgttgatcaggctggtcttgaactcctgacctcaggtgatccactcacctcgtcctcccaaagtgctgggattacagttgtgagccactgctcctggcaatatttccttttttcaaaatttcagtacgtatttgaggaacaggtggtgtttggttacatggataagttccttagtggcgatttctgagatttgggtgcatccatcgcctgagcagtgtacactgtacccaatgtgtagtctattatcccctgcccctctcctacccttccctccaagtccccaaagtctattgtatcattcttatgcctttgcaccttcatagcttagctcccacttacgagtgagaatacacaatgtttggtttttccattcctgggttacttcacttagaataatggtctccaactccatccaggttgctgtgaatgccattagtttgctcctttttatgactgagtagtattccttggtgtttatatatatgacatgtatatatatatgtcacattttctttatccacttgttaattgatgggaatttgggctggttccatatttttgcaattgtgaattgtgctgctataaacatgtgtgcaagtgtctttttcatgtaatgacctattttcctttgggtagatacccagtagagactacccactattgaaagggagatgacctggtaacctcttcaacagtatgggaacccaccctggtggtgggttgaccatggaggttgacctggctgcatgacctagcaaagattgtttctcttgagttgattctggcatcacaactggccccttttttgatggcctcatttttaccctgcagaaaatgagttgacaaaaggctcagcatttcctcaagaacaatgttcaaatgacaacttaaagcttttgagaaagtaggacattttatggcttctccttgcaaagaagattactttagaaaactgaaaaaataactttgaagagaaggatagaaaaatcgggggaccaagcacattattattttctgggatctattatttggtatgttggaaatcaagtacaaagctacgtaaaagaattcttcatattgcaaaaacattaccgcaatactttgtaaaataagggctatagcataagaaaagatcacagtcccacaactcaagcaagacagaccgtctgcattttgaagtcatccctgccattctttgcccacatgtgggtatgctgtatattcttctgctgaacaattttgcagccttagaagggccttcatgggttgggtgtggtggcttacacacttaatcccaacactttgggaggctgaggcaggaggatcgcttgagctcaggggtttgagaccagcctgggcaacatggcaaaaccccatctctaccaaaaaaataaaaaaagtatccaggtgtgacggtgcatgcctgtagtctcacctacttggaaggctgaggtgggaaggtcacctgagccagagagatcaaggctgcagtgagccatgatggcacaactgcactccagcctgggcgacagtgtgagactctgtctccaaaatataaaaaataatgaataaaataaatacaaaataaaaggcttcgtgtgcattataaacgcatttttacctctcatacagttgtttccgttgttataatcttaaaggatgcaaatgttctgcttagagatgaattagcttcttatctccagtgcttgaatggacaagtgctctgtaaatatttgtgaaatgaaaggaaacccagggcatttaaaacattatttttggccaggcgtggtggctcaggcctataatcccagcactttgggaggctgaggcggggaggtgggcggcggtgcagaatggctttaaaggaaaggatcagaaagcaggacctctctggccccttgagactctgagtgtcctgtggtgcccagttgagaggtctaacttaggatgcctgtacacttctggcttctccctgagtgctcaaaaacctaccttgcgagcaggcattttctgtttattttctttcattcctacaagcctgtcaatagtgcatctctttggctcacctatgagcaacaagaaaagaccacaggttgtcttgggaaacacggaatggggagacccaaactggttcttgctgtatcatgtaccagttgctccccttggacagagaaattaaattctttggctatgtggtgtgtattttttaaagagagagagggggaaatgggattttccacacccctcctgtctgaagggaggtggggctgaaaccaagctccacgattcattgaatcggaaccctgcccagagacctagagaagagatcaccccagcagtgactcgggatgggcaggcaaggtggcgagtcccctgtgatggtggctttcactggtgtctgcgttcagcctgtaacatgcgtgcattctttcccaaatgtctcccaggtgccatcagtttcctgcgctctctcctggaaccggatcctgtgaagaggccaaatattcagcaggcactggcgaatcgctggcttaatgagaattacacgggcaaagtgccctgtaatgtcacctatcccaacaggtaatttcgtgcacccagaggaactcctcgggagagacggggcctgtcctactagccctgagcagttccggacagaaagctgtccgtgattgaaggaaaagccgcgctctctcttggctatctccccttccccctaacacccacacccacacatccacaagaggaagcgtagacagggccaccatgtgctgttatgccgtgtgccctgcaggggcacctggaggagaggtgagtggaggctgatatccaggctttgagggtctgtatcttcccaggggttgcctttttctagttcacacagagggacctttgagactagctgtggcccgagtgtgtgtgtgtgtgtgtgtgtgtgtgtgtgtgtgtgtgagagagagagagtgagtgtctatgtctgcttgggtctccatgtgcatgggtgttgtgtctgtgtgtgtgtatgtgttgtgtgtaaatttgtgtgtgtgtgtgtgtgtgtgtgtgtgtgtgtatgtctttgttttgtttttttaatacatagtctggctctgtcacccaggctggagtgcagtggcgtaatctcagatcactgcaacctctgcctcctggtttcaagcgattcttatgcctcagcctcctgaggagctgggattacaggaacgtgccaccacaccaggctaattttgtatttttagtagagacggggtttcacctcttgcccaggctggtcttgaactcctgacctcaagtgatccgcctgccttggcctcccaaagtgctgggatttcatgtgtgagccaacgtgcccggccagtccttgtgttgtgagtgtgtttgcgtgtgtgtgatcagctcacgagcccacctgccaacatcaaacagaaacatgggatcgcccctccctttccaaaccacccttagatgccttcttctgccttgttcttgatgtttatttcagccctaagacccctgccttaaaatgtgggaggcaggaaggaaaggcataggagtcattcgttttaggccgggtgtccctatgaactttccgtgaaggcttcactttatcagtttccatgaggagggttctttaagcaaagcttgcagacaggaacccacagcataggagcactgatgggctccctgtgcagcccacgcttctccatgctggtgcgctaactacagattaaaaaacatttctcttttttcttttttttttttttgagacaaaaccttactctgtcacccaggctagagtgtagtggcatggtcatggctcgctacagcctccacctcctgagctcaagggagtctcccacctcagcctcctgagtagctgtgaccacaggcatgagccaccatgtcaggcacattttctatttttcttcagagacagggttttgccatgttgcccaggctggtctcaaactcctgggctcaagtgatcctcctgcctctcaaggtgctgagattacaggcttgagccactgtgcccggccaaaaacatttccttgtatatttttttctactcatttgtcctatttctaactaacctgagcgagggaatgagggcccttattttggctgtttttgagcaaacaaggaaaccacgtgggttcagtaccttccaagactgggacccaccttccttcttccttcagacctagggtggcttgcacatttgaccaggcttggatgaagacaagagaaccactgacccagaggggcagataggagactgaaagggcagagaaaggggtgtcctgtgtggtcataggttcaatgcctaggaaggtctagaaacacccaccaagccttatgaaagcagaagtgctgagtccttcaaagaagatggccaggcagggctctgcttgggatggaagctctagaaaaactttaaaggggcgtgggagtctgcatccacacttcagtgccaaatttacactcaccgtgcccagagaggaggtggtttcactccgttgccatctagaattctagcatttggctcatgggaggtaatttaaacaaagtctaggtgacttaggttaccaagggaacctggaaatagattgctgttttccaataacagctcgatgtgggccaggatctgaaacagacaccagaaatactactccaaagcgaggcagggagcaaagctgaaaggaccttgcctcattatccatactcatgatggagagcagcacgcaggtatgctttctgttaaaggagggggccttgctggtggccacatgagtcattaagctcatgtaatcaccgcctaaatgagcataatcaatccactcaatgcggcaactgttgaaggaagtggagttggtgttagacagtatttcccctccttgttggctgcatcttcattcacaaagaattacgaggcgacatctcattttgtagctttcccacagtttgcagacaggctttgatagattaaaacttataaaacaggataggcaactcctatcctgttgttgccagattattgtaatggtttttgcatttggacttggtcagaagcataatggctgcacatgaaactggttaagtggattgtaaaactggctgagatctcacatgctcaggaaaacagcactcagtgtcttctgtgtgtataaggcccattgctgattttacactagaggcaaatcagtgtttggtttttaagcgtggaaccagaattctttttctttatttttatttatttattatttatttattttgagacagagtcttgatctgtcgcccaggctggagtgcagtggtgcaatctcggctcactgcaacctccgcctcctgggatcaagcgattctcctgcctcagcctcctgagtagctgggattagtgccaccacgcccggctagtttttgtatttttagtagagatgaggtttcaccatgttgcccaggctggtcataaactcctggcctcaagtgatccgcctgctgcagcctcccaaagtgctgggattataggcgtgagccaccaccgtgcctggcctggaaccagaattctaggctgttgggggaggtacatgttatttacagtgtttattttgaaaaacatttatctttaagacaaaaaaaatgtattttttatatttatttttctggttttactggcatgtagataaagggagtgagaacatacaaacagagaaagggatattttctttataaagtatgttttatagtttcccaacatacctagccccagatgtattttaagtgttgtcaatatttttcttttgagaaagttaggaaaataaaggtctcgtattttacatcactcttctataaagccttctcctgtgaagtcatttcagcctccaagttgatctctaaaagcaaagagggaaatgtctttggaagtaaattttttataaataaatgtttatgccagtcagtcaacagatgtttgctaggtgccagctcccctcctgatccaggtgcagactttttttttttttttttgagacaagtcttccttcatagcccaggctagagttcagtggcgcaatcacagctcactgtgacctagaactcctgggctcgagtaaccttcacgcctcagcttctatagtagagggactacaggcatgtgctaccatcgccagctaagtgtttctatttttgttgtagagatgggggtttttctgtgttgcccaggctggtcttaaactcctggctccaagcactctctgtgcctcagtctcctaaagtgctgggtttcagacttttgtacagagccaagcttgctgcctctttctgtctccctgcaggggcctggacagtctctccacccctccagttagctttggaactggtgggaggggaggaggtcgcaggcaatacaggacagaattagaccaaattagatccatggtatcaaaatggattgcatgtgaatttgctcaattcaaattatatctagtattctggaacattgtaccattctctgtgtcatccaaacatgaagccatatacagattggttaagtgatacttgaaagcatcaggtttatgcatggtttataggaaaacatttaaactattcctctcagtccagagtcagttgaccatttacattttggcagagctcgtttttgaagatactggacataaaaggcagagatggggtgtctgcccctgtgcacacctctcctttccatgctgctgacttttcttccagaacaccccataccctcggcgggtgcactgctcttgggattcccaggtatttccaaaccactgttccctctgcattgttttggtagacctcaagtagttattttaataaacaaacttgttattaatacactttttaagccagtaatcgtgccaatccctctcccacatgttatctggaatgtgtaattttgtgacaaacaggaatgaggaaggctgatctcattgtttgttgggtgtgttttcatttgtttgtcttttgggacagcacttaggcaaaagtagtggagggagaactgatgtaggttacaccgaccggtggcaggcaatggtcaggagacctcgttctgctctcggtgcccctgccaaccggccgtgtgcagtgggcaagttctcttcttacagaagaacttgcaaagtctcctcttctttacaattatggggctacctctctgggcattatggttctgaggttctatccaaatgtcttcagaccccttgacatggaggctagtggctctccagccagataacttgccttctgctccgattgccctctttgtatcactctttttatttatttattatacttttattatactttttaatttttttattatacttttaagttctagggtacatgtgcacaacgtgcaggtttgttacatatatatacatgtgccatgttggtttgctgcacccattaactcgtcatttgcattaggtatatctcctaatactatctctcccccttccccaccacaggccctggtgtgtgatgttccccaccctgtgtccaagtgttcttattgttcaattcccacctatgagtgagaagatgcggtgtttggttttctgtccttgcgatagtttgttcagaatgccatcattctttgtatcactcttaagggatttagaatgttcttttgacacagccccactaccaacacatacactcccttagagccctccccctgatttctcagtctccatagccattggatgatggtgatggtggtggtgatgatgatgatgatgatgatgatgatggatgtgtctgtttatttgggaagcagtgagcatctagacactgaacccggctgccggttcttaattctagggctgtcacttcctgcctgtgtgaccctgggcaaggtactgcattgctgtgggctttggttttgttatctgtaaagttggggtcatgatagtacctactcataggactatcaggatgactaagtgaatttacatcctctcttccccactgggagggtgaacaaatgaatgcgtagatgaatgaagcccggtatttctttgccattttatcccaaggagtttatcttcacagtccccttgtgaagtagctttaactctcttcctctgagaggaccccactttgccgctgagccctgaaccccccatgtatgaacttatgaactctttctgttcccctaaacatgatctggctagttcctgaataccttccttttccaccccaaaatccagagtcagagtggcttctgtccatgacaaccaatacattttaaggaaagaatgtgtgatcataaggaaatctgggggacagttgggagatttgagtataatctgggtattagatgctattaagtgattattaaaattttattgggtatgttgatggtattgcggttctgtgggggacatctttggtttttgaaggtgcacactcaagggttaaggggtaaaatgtcatgatgtttgtaatttaaaatacttcagcaaaaaaaaaatgcaaggatggcaaagtgatcactggtatatctagatgatggtatacataaagtgattgtactattccctccgcttttctgaatacgagaacattttcaaaataaaaactcaagtcagtgaatgaatgagtgaatgaatgaagctgattgtgcccagggggtctgtgtggggctctccgtgaagtgcaggggtgactggtcctctctctctgcacctcgcaggatttctctggaagatctgagcccgagcgtcgtgctgcacatgaccgagaagctgggttacaagaacagcgacgtgatcaacactgtgctctccaaccgcgcctgccacatcctggccatctacttcctcttaaacaagaaactggagcgctatttgtcaggggtaagtgcgaccctagaggcgatcgtctctgctgtctgtggaaaaaagagctcctacacccaaagtgcttctcagttgctgacacttgatccaagctgctaatttaatctaatgtgaggctgagttttctgaatgtgggataaagtcgtagctaaacctgcttctcagggagtgccttttatctgcaatgtttttcaaatactctcccaccgagttaagccctgggcagaattgggaggggttcaagcctctttttccttcaacagcatctctgttgtcttttttttttttgttctgctgcctcttaggtctttgggttccccatgttggaggcattggagggttctctggtcctaaaactcgggtagcagtgcctcccgggcatttgtctctgaactatggtattatatatgagaaagccactatttaggtttaacttctccagaaaataagaacaaaattggacttgcctggcctgactctggcaccttccctcagtctgagtgtcagaaagtccaagtgtctggtgtcacccgcgaggtacctttggggtttccacagcgtggggtggatggtgggaccctgacaccctgtccccttcatcatttttgccacaagcagtttctgtgtgcctgagtaagagaatttatgtgccttaaattgtctctctccaaatggacaatggcttaaaaagaattctgcaaattggatccaagacaatatggagtctgcatacagcagctcatgcttttactcagaatggtgggtgctgaccagctctaacagggagtcagccaaagaaattcagaattgccaggaagcctatctgaaatttgactgagtgttcactttcacgagggaccaccttcaccctgggcctgttgcaccttgacatctgatggcgtggagttgtcactgttaggaagacatttaccatccagaacatgtgctattgaagtcacgtgatagcccaatatgtcaccaaatttcactagacaataggcttagaaacctttttgaggtttctatatgagagctaaagatgaaaatctacctgcagttggggaaatgatattctcgctggcatggtggagatgaccaaattaatacccggaggacaaggtagtcagtgtgtgtcttttgttagcaaatggatttgggagccgtctagaaaacattgctgaacagatgaagatgctccacgggaggttggttaaacatttggatgaaagtacagatgtttctaagctgatttagctcagaatattggctagattgtgcttccattgtgcttccgcaggaaattatccacagaactcctttgtttttgtttttgtttttttgtgaaccaccaaaggaaagatctacatgagaagaagtactctcaacaataaagagatttaacaatgttttatgggggaaaaaacgtggtctgtatgatggggtggcacctctctgatggggacagagtcaacgctttgagttagatttcacagatggtgtcactgtggctgccttgctcatagaaagctactggagaagagatgtcaaatccagaaagacaggactttcaacatatagtatactatttattttattttattatatgatgaggagagattcagaaaatctcttgtatcacacagcagttctctgttctctcatcacaaggaacataaaagacatactggacttgaagctgtttctctctcatttctcttgttttaattgttttttgagacttttttttttttttttttttttttggagacggagtctttctctgtcgcctaggctggagtgcagtgggacgatctcggctcactgcaacttctgcctcccaggttcaagtgattctcctgcctcagcctcctgagtagctgggaccacaggcacgtgccaccacgcttgtctaatttttgtatttttagtagagatggagttttgccatattggccaggctggtctcaaactcctgacttcaagcgatcctcctacctcagcctcccaaagtgctgggattataggcgtgagccaaagcacctggccctcttttttttttttttcttttgagatgaggtctcactctgtcacccaggctagagtgcagtggcatgatctcggctcactgcaacatctgcttcctgggttcaagtgattctcccacctcagtgtcctgagtagctgggactacaggtacgcaccaccatgaccaactaatttttgtatttttggtagagatggggttttgccatgttgcccaggctggtcttgaattcctgagctcaagcagtctgcccaccttggcctcccaaagtgctaggaatacagctgtgagccaccatgcccgaccccatttctcttttgcaaaaagactatattccccaaacttctttctcatactttaaaatttctatttattatatatcttatagcgtacatgatatattcgtacaatgttacatgcttataatttataaatatgcatatgttgcaggtgcctgcttacaagtttgtcacacataagggattagggtcatagcatttggacaccaccatgctatagaggatgaaagttaagaatttaaatagtcttcagataaaaggaagaaaagagggttaatgcactggtaatctttttcaggtgatgaatactgttcaaaacttagttattcaaatgtgttttcatgaaactgactatattataaagttcatgattttgcttattagagaatgacattgctactttcccaagtaagttaacagttccaaacatttttcttttggtggaactagttctttcaggtgctgaccaagtaagatggaggggtgttaggttttaaaaaactgtcctatgtttacttccacatttagagatacaagcttttgtgattcacgctcttcttaaacaaatacatagctcatgccaagcaagagagacattttatctgaagcttttttgtcttttaaaaccaaaccaaaacaaaacacaacaaaaagagtctcactctgtcgcccaggctggagtgcagtggcacaatcatggatcactggagcctcgacttcctgggctcaagccatcctgctatagtcccagctactcaggaggctgaggcaggaggatcgcttgagcctgggaagtcgaggctaattgtattttttgtagagacgggctttcgccatgttgcccaggctggtctctaactcctgggctcaagcagtccgcccgcctaggcctcccaaagcgctgggattataggcatgagccactgcacctggcctgaagctcttagactgtgtcctgaggtgcctgggtgtgttgccagctgctgcatttctgcctgtctgctttgcccagcatccaggctgcaagtgttgcaaagcagagtgtggctttgtcatctgagaacattctctggaaactcagctggtgtcattctaactggaaaaggtttgggggttgttttcaattaaatttatttaattgaccaaaaaaatggtatatatttatcctgtacaacatgatgctttgaaatatatatacattgtggaatggctaaatcaagctaaataatatatgtgtaaccacacaaatttatcatttatttgtggtgagaccattgaaaatctactctcttagcaatttacaagaataaatacactgttattaactatagtcaccacattgttcaatcatgtcttaaatttttttcctcctgtttaactgaaattttgtatcttttgaccaatatctcttctgcccactttccctcatccccttcagcctctggtaaccatcattctactctctacttctgtgacctacactttttagattccatgtataagtgagattgtacactatttgtctttctgtgcctggcttatttcacttagcataatgtcctctaggttcatccatattgtcaaaaatgacagaatttctgtctttttaaaggttgaatagtattccattatatataggtaccacacactttctttattcattcatccgttgatggacacaatagccatttcctggctattgtaaataatgctgcattgaacatggggtgggggtgcatatgtgtcttcaacatactgatttcatctcctttgaatatagacccagaagtggaattgctggatcacatggtagttctacttttaattttttgaggatccatactgatttccataatggttgtactaatttacattcccaccgacagtgtgcaaaggttctttcttctccacatcctctccaacatgtggtatcttccatctttatgataaaagctgttcttacagatgtgaggcagtatctcattgtagctttaatttgcatttcccttatgattggtgatgttgagcatacctattggccatttctttttttttttttgagagggagtctcgctatgtcaccaggctggagtgcagtggcgtgatctcggctcactgcaacctctgcttactgcaacctctgcctcctggattcaagcaattctcctgcctcagtctcctgagtagctgggactacaggtgcacaccaccatgcccagctaatttttgtatttttagtagagacggggtttcaccatgttggccaggatggtctcaatctcttgaccttgtgatctgcctgcctcggcctcccaaagtgctgggattacaggtgtgagccaccgcgcccggcccctattggccatttctatgtcttcttttgagaaatgtcttcagatcctatgtgcactttttaattgggttgttttctggctattgagttgtttgcattcttttttttttttttttttttttttttttgagatggagtcttgctctgtcacccaggctggcgtgatctcagctcactgcaagctccgcctcctgggttcacgctattctccagtctcagcctcccaagtagctgggactacaggcacctgccacctcacctggctaattttttgtatttttagtagagacagggtttcaccgtgttagccaggatggtctcaatctcctgacctcgtgatctgcccaccttggcctcccaaagtgctgggattacaggcataagccaccacgcccagctgcattctttatatgttctttgtcagatgtatggtttacaaatattttatcccattccatagatctctttactctgtcgattatttcctttgttgtgcagagcttttgaatttgatgtaattacatttgtctatttgtgcttttgttgcctgtgctttgggagtcatgtccaaaaaatcattgtccagaccaatgtaatgaagccttttctgtaggttgtcttctagtagatttatagttttggatcttgtttgtttgtttatttatttattttttgagatgaagtctcactctgtcacccaagctggagtgcagtggtgtgatctcagctcaccgtgacctccacctcctgggttcaagcgattcttgtgcctcagcctctcaagtagctgggactacaggtgtgcaccaccatgcccagcaaatttttgtatttttagtagagacggggtttcactatgttggccaggctggtctcaaactcctgaccctgtggtctgcccgcatcggcctcccaaagtgctgggattataggcgtgagccaccgcaccaggcctgtcttcttcttttttttttttttttgagatggagtctcgctctgtcaccaggctggagtgcagtggcgcgatcttggctcactgcaacctccgcctcccagcttcaagcgattctcctgcctcagcctcctgagtagctgggattacagacgcctgcctgccaccacacgtggctaatttttgtcacgtggctaatttttgtatgtttagtagagatggggtttcaccaagttggccaggatggtcttgatctcttgacctcgtgatctgcccacctctaccacccaaagtgctgggattacaggcgtgagccaccatgcccggcctgggcctaagtctttttttctttttgagatggagtttcattcttgttgtccaggctggagtgcaatggcgagatctccattcatcgcaacctccgtctcccaggttcaagcgattctcctgccttagcctcccaagtagctgtgattataggcatgcgccaccatgcccaggtaattttgtatttttagtagagatggggtttctccatgttggtcaggctgatcttgaactcccaacctcaggtgatccacctgccttggcctcccaaagtgctgggattacaggcatgagccactgtggcccgggcctaagtctttaactcattttgagttgactttgcagatggtgtgagacagggtctgatttcattctctgtggatgtccagttttccaacaccatttatttaagaggatctcctttccccattctgtgttcttggcagctttgtcaaaaagtaattgaccgtaagtgcatggattcatttttggactctcttttctattccattggtctatgtgtctctgtttttatgccagtatcatgctgttttggtttctatagctttgtgatgtgttttgaagtcaggtggtgtgatgcatcaactttgattttattgttcaaaatgactttggctattcagggtcttttgtggttccatacaaatgttaggatttttttttttttctgtttctgtgaaaaacgtcattggaattttgacagggattccattgaatccgtagattgcttagtatagtatggacattttaatcatattaattcttccaatctgtgaacatggaatcttttcatttacttgtgtcttcttcaatttctttcatcagtgtcttatagttttcagtgtacagatctttcacttccttggttacatttattcctaagcatttgatttttttatggctattgtaagtggcattgctttcttgatttcatttttgaatagtttgttgttagtgtatgaaaacactattgatttttgtatattgattttgcattctgcaactttactaaattcatttagtagttcaaacagttttttggtagtctttagggttttctatatataagatcgtgtatctacaaacagggacaattgaacttcctttccaattttgatcccttttatttatttatttatttacttatttatttagtttaacaatttcccaaatatttttatttttattttttcttcaacttttattttaagttctggggtacatgtttaggatgtgcaggtttgttacataagtaaacatgtgccatggtggtttgctgcacagatcaacccatcacctaggcattaatcccagcgttccttagctattcttcctgagggtgcctttgatttctttctcttgcctaagtgctctggctaggacgtgcagtactatgttgaatagaagtagtaagagtgggcttctttgtcttattcctgaacaagttgtctatggggattaattcactctagttagaaacacctgcttgcctagagtgtggattctcagaccagttgtgagttttatgatgtctgtttcacatttaatgcttaaatcatagggcatacctagtctgagaatccatactctaggcgagtggctgtttttaactggagtgaattaatccctacagacaactcaactgctcagtaatttctgcacatggctaatttaattgtactgtatgcattgtcccggttattaattttatcaaccaattatttacaccccgtgtataattttgaagcccaatctagtgaactaaaaagtaaaatgttatctcttaattgtcatctcttcccttctcttttggtttcctctttttaaaaccacgaagttcgtattttaagatagagagcctgtaagggcatttattaactatttgttggttgattaattaattaatccatgtttttatttcacccatttccagacaggattgcaccttcctcagcttaggtgcagctgtttatcttctttgagctatgttatgaattgttatggctttcatttgggtggtggtagtggggagcagtgtgtacatgtgtgtttgtgtgtgtgtgtgtgtgcactgttttttgtttatttttatttttatttttttgagagacagagtctcactctgtcacccaggctggagtgcaatggcacgatcttggctcactgcagcctccacctcccggattcaagtgattctccttcctcagccacctgagtagctgggactacaggcgtgtgccaccatgattggctatttttgtatttttactagagacagggtttcgccacgttggccaggctggtctcgaactcctgacctcaggtgatccacccgcctcggcctcccaaagtggtgggattacaggtatgagccactgcacccagccgtgtgctgttttaaaataaagcaaacaagcaagatctatgttctatgcagtggttcaataaaataagttattctttccagctcattttcttggtttctctgttcgtgtttttgagtagtcttactgcacagataaaagaactgaggccctgcagggggcagtgatctactcagggtcacctggccctttactggcagcgatagtaacacaaagtaggtgacctgactctgcgcccagggctctccccacactgcaacctgcctgcaggccttcctggggtgagacttgatgttgcaatttactggactgccaaacatttccagcattctctcagccaagcgctggtttaaaaattaatgactgcttaatgggcatttctatttctgagagttgagctgtgctttttcttttctcctctggtagaaatctgacatccaggacagcctctgctacaagacccggctctaccagatagaaaagtacagggcccccaaggagtcctatgaggtgagtgacccctgaagcaaacctcagggtctcttaggaagggtggatttccatttgcagtaattggaaaagaaaccaattactgtgggacactgaagtagcaaaagacacatacttacgctcataactgagcccttgagaaatggtttacagcggaaccagctttgcggtgtctaaaccatggttctcagctgtggctgcatgttaaagtcacggggagcgtttaaacatctggatgcccaggccgcacctgggacccattccattgaatcttgggaggtgagactcgggtatcaggagtttttaaagctccctggatgttccaatgagcagccaaagttgaaaaccactgtcaggatctcccaaaatgaaaatgagatgtttcagtgtttcactcatatgtgagtgaaactagcaaaaattgatctcatagaagtacagagtaaaactgtggttattagaggcttggaatggcagggggaagggagggtagagagaggttgcttaacgaacatgaaattacggctagacagaaggaataagttccggtgttctgtggcactgtagggtgactatagttaacagtaacttattatgtatattcaaaaagctaaaagagaattttgaatgttcccaataaaaagaaatgataaatatttgaggtaataaatatgctgatcaccctgatttgatcattacatattgaatacatagatggaaatatcattctctgtcccataaaaaagatgtataatgattatgcgtcaactaaaaataaaaggaaaaaaatgcaaatgctagaaaaaaatgagatgcttaaaaatagagctgagtgtaacacgtggcatcagaagaaagtgagatgaggaacgcaaaagtttgggatcaggcaggctttcctggccagctgtccctggtgacctgatgtaacctgggacgtacctagagaaaaagaacacaactctgatttcagaataaaaactaggctcctgtagcaaacatcccacatccatgtttgttaggaaactgtgtctgtgaattccagatccagggagggggccaggagtggggtgcagcctcagggcccctcattcactttttgccaagtgagcttttctttctctcagtgattttcctgggaaccaccttcccttttccctctggagcctgtttatgtcccctgagtgtccttgccacaggaacctctctcctgggacacccaggtctattagtctgttctcacgctgctaatgaagacatacccgagactgggtactttataaaggaaagaggtttgatggactcacagtttcacatggctggggaggcctcacaatcatggcagaaggtaaatgaggagcaaagtcacgtcttacatggtggcaggcaagagagcttgtgtaggggaactccccttaataaaaccatcagatcttgtgagacttactaccatgagaacagtatgggggaaacctctctcatgattcagtgatctccacctgtccccgcccttgacacatggggattattacaattcaaggggagatttgggtggggacaaatcaagtcacccacccagaagttccttcatttgagaagggatcaaaaagggaccctttgtctatgccccagtgaggtcactgagcctggcctctcccctctttccttttccaacgtaaagttttcatcctgatcccatgagcggtgcacatcgctctggaagattcttctctgggcttgtcttgcacgcagggctgcagtggagcatggtggttactggggcccacactgggctcctaggcagccagtgaagcaggtgtccagagacactgatgacagggagtgcccagctgcaggactctgtgcgaatgtgatgggagctcaggagagggacttgcccccggcatagaggtgggcaatggcacaggtctccatttcagacagaccctggggcagagagagaggagaaactggcaaagacagggctggaggtggccggcagtgggcagccggcagggggcggggcagccagaaggcagtgatgctgcagtggggcccgtgggaacagaggaaaggtcacatgtgaaatggtcagcattgtctactgggcagctagttgtcctgaggatgttagaaagaacagcttcgtgaagtgccaaaggcagaagagaggttgcatggatttggggggtgggagaggggaagggaagtcagtgagcatctgcctctccgtcagtgacactgcagtgaagggagagaacatgacctcgatagaaggatgctcaaggccaggcaggaatggtgggccttagccttgaccccaggctggatgcccccttcctcaagacaggctgtggggctcggggaagatgaggatggagacaagccctttggaaggtgggctgtggccacagaagctaagccacaagcccaggtgtggctttcaggcttaaagccagagagccaggtggtggggacccagatgccccctgaactctagacccctctggccagttgcttactaaatgttaaccccctcttgcatgaatgaaggggtcttgaatctagcacgctctgaaccagactctccccccgccgccctccgccctccaccacagtagcagccccatcctccccagcagtgcaaggaagaaacccaagagtccttgactttgaccctccccttacccccagagccaacccatcaccacattctgccaatttgaccgctaaacccctccaacccctgcactctctctgtctccatccccacacctggtcccagccacatcacctctgtcctggacttctgctatgccctcctaaccgactctcttgcttccgggatggtggcccgccactctctcctgcctggccgtcagagcgagcttttcaccctcgcaccgcatcatgtcactttcctgcttgagaccttcggaggtttccttcatttgccaggcagactccgtgcatggtcgccctgtgtggttcagccccagcttgcttctcctgccttgtctcctagccacatggcccacacacacagcgctgcatccctccctgtgctcagtccacagccttcgggcttgctgtgctctctctgcctgtgggggctgtgcacatgctgctccctcttccagagtgttttccctgctcctctttgctgaacctaagtgtcttcagatcccagagcaagatcacctccccatgggcacctgctgttccctgacctctgccatccagtcttatcctatcgatcctatctgcctaccacgttctacatcctggggcctgtcccatttgcagctgtttatttgttttggggttgtttgattaacatctctccctctgggctgtgagttccagaagagtgggctctgagtcccttttgctcctcacaatattcccagaggccacacgatgcctggcatgtaggtgctcaataaatatttgctcaataaacaaatgaaaagatcaagtgggccctgatcagagtctcagaaaatggataggtctgggataagcaaccggaataggtagaacattccaggtgggatacctggctggattaaaggcagggggatacctgcagcctagcacacatatgacgttatcatcaccaaatggccgtgccttacggcagggagggacctcttatggtcacctgcactgagggtggtcaccccagccagagtccaggggatgcagaattcactgttagacttcctgcctcgtgctttgcatgtcactcatgaggacctcaaataacaatgcaaacttaggtgcatggagagcccaatgtgtgtaccctaggtggcccctaagccaacttgccgatgccctggtccacgctgacctgacacctgccccactgcgagtgtgtgtcggaaggggccagaactatagtgggaaaggggcccttctttcatctcgattccttttctgtgttatttcctctgtcctgaagacacatggtgagcgttttaaacatttgttgaaatatttaatggttaggatttaaataggaaccctaatgggcaaacagcattcaattttctatgatccatttgtttcctctaaactgcagtgatacttctctaattaaatgacagctattaccagatgatccaacttgtctcccgaggaacctagaaagtggagtggggctagttcaggaaagggaagggcccaggcctcacagggaaagtccattcggagccagaggaccttccagtcgtcctccgcaccacatggcagggggtggagctggatggggagagggagtggtggagaggtttcagattgtgagcaaaccagggtgtggcccagggctcgtgtcccctagggctgtcatcaacccgtgtcccgggcactgagtgcaagcagtggcctctttgttccttttgattccagttcgttttctcctaggagacaaaggagctgaattaagttgcaaaaacttccctcttggggtaaccgtgcagtgattttacaactttaccattttctctacctctttttcctgtcaaaggcagagactgtatctataaaagtggggtgcatttctcatctgaggaggacacctatcgtgtgtgcccgacggactcctttttctgaaaaagagaaccccccaggactttgggggtcgaggtggggaggttatcattttaaattggcttatcaaagccattagagagcccagggccagttttattaaagtcttttgaaaaataatgttaatttataggaaaatgtcaaatccagctaggaggtctcctctgcaatgacaaagtaatgttggcgttttggaagaaaactgacggagagggtggcagggaactggattcgtctgcttggctgctctaacaagcaccacaaaatgggtagaaatttaacttttcacagttctggaggccaggttcagggcttacggatgcatcactatgatctctgccttcatcttcacacagtgttctcctgtgtgtgtatctgtgtcccaatttccctgttcttttctctcctccctccctcatttttctctcttttctctcttttctttctttctctttcttttctttttctttttgctttattcttttctttttctttctttcttcctctctttcttctttcttccctttttccttccctccctccctcctttctctctctctctttttctgccttccctctcctctcccctcgcttcctcctcctctcccctcccctcccctccttcctttttctttctcggtttccagaccaagctggagtgcagtgacacaatcatatttcatttcagccttgacctccctggctcaggtgatcctcccacctcagcctctctagtagctgggactacaggcatgcaccattatgcctggctaattttttgtagagagggggtttcaacatgttgcccggctggtcttgaactcctgagcttaaggcatttgctcatctcagactcccaaggggctgggattacagatgtgagtcaccatgcctggcccaaatttccacatttttaaaggacaccagtcatactgcattagggctcaacctaatagcctcatttaaacttgattacctctgtaaagattctctctccaaataaggtgaaattctgaggtcctggggttagactttaacctatgaattttaggagaatacagttcaacccacacagggatgaaacatttaaaggcaaatattaaaatattcactttgtgtcttatttcaaaatctatataactttaaaaaatatagttcagaatcagatccagcaatctgtgctattagaaatcagaagtgtagttacttggccgggctcagtgctcatgcctgtaatcccagaactttgggaggccaagatgggtggatcacttgaggtcaggagttcaaggccagcctggccaacatggtgaaaccccgtctctactaaaaatgcaaaaattagctgggtgtggtggtgcacgcctgtaatcccagctactcaggtggctgaggcaggagaatcgcttgaacctgggaagcagaggttgcagtgagccaaggtcgtgctactgcactctaacctgtgtgacagagcgagactcggtctcaaaaaaaaaaaaaaaaaaaagcctggttactttgggggacagaatgcctggcagaggacatggggatggcagggaggaccttccagatgctggctgtgttctgttttttgatccaagtgccatttctgtgggtgtctttgctgtttgagaaaacattgagctgctgacttatcattagagcactcctccatacggcatcttagattttaataaaaagtttacctagaaaatctattcagcacacgagttaggacatctgctgtctacttccatggcaatttcaggatttgctttctgtctatgaaaaccgaaacgaataattctcaaccagagctgcagggccgtaggggaagcatttagggaataaatagcaggtgcagattctcgaattgttgaaggatgttccttttcacaggcctctctggacacctggacacgagatcttgaattccatgccgtgcaggtaagaacttgggggattattatgttagtcagggttctccagagaaacagaaccaatagagtatggagagagagagagattgagactgagatttattttaaggagttggctcacacagttttgtgggggttggctggaagtctgaaatctgcagggcagaccagcaggttggttgaattgatgttgcagcttcaagtctgaaggccatctagaggcagaatttcttttgccagaagacctcattctttttttttttttaaagccgttgactgattggatgagacccacccacattatggaggataatctacttgaagtctactaatttaaatgttaatcactttatttatttatttatttatttatttatttatttatttattgagtctcgctctgtcgcccaggctggagtgcaatgttgtgatcttggctcactgcaacctccacctgccaggttcaagcaattctccggcctcagcctcccgagtagctgggattacaggtgcccgccatcacgcctggctagcttttgtatttttagtagagatagagtttcaccatgttgaccaggctgatcttgaactcctgacctcaagccatccacctgcctcagcctcccaaagtgctaggattataggtgtgagccactgtgcctggcctgttaatcacatctttaaaaccaccttcacagaaccatctagactggtgtttggccaaacaactgggtaccatggcctaggcaagttgacatatgaaattaaccatcacatatgatcctaagggttggtcagtctctgcccagggcagcaggctctgccagccccatccttatccagaattaaaacatgcagaatcctgttgtgagtgagtttatcagaatccctttagatcacattggttcttgctatgcggaattggctgttttttattgtcttgttacaactctacacctgcctgtgcatttctgttaccacctgtatgagaaatggagtttgcagctatctagagcttcctggctcaatggcctaatttatgaacaaaaccccaccttttttttttgaggtggagtcttgctgtgtcacccaggctggagtgcagtgggtgtgatcttggctaactataaactctgccttccaagctcaaatgattctcctgtctcaacctctcaagtacctgggactacagacgctctccaccatgccaggctaatttttgtatttttagtagagacaggatttcaccatcttggccaggctggtctcaaactcctgacctcaagtgatctgcctgcctcggcctcccaaagtgctgggattacaagcatgagccactgcgcccggcccaaagccctctttttatccactcacttgtaggtttttctgcagcaaaaccaggtttcttcttatgtgatgggtgacaaggaaccaaaaccaaccagccaacgacatctgggccctgggccatcccaggtggcagcagtcagcacttggttctgacagaccaaacagcctggtgaggcttattaatcatcagagggaaggaaagctccagaaaagcccatgtcgaactggacttgatagagttactcaaagaaaacttacctcagctcccagggctcctctgccacatgtggaaacaggcagatttcccaggcagccatccatcctccggcctggggtgatgaggatgcaaagcaagcatccgtccctgttaaatggatgcatttgctgttcaggcgataaagcaagtgtgatgtgtgttcattgttatcctcccagagctgggaaggatccacacttttggttacacgtgggaaaacacctccctcgaggagaagtgaattgcccaaggttacccaacacattatggagagagcgaggaatggactccagacttccggactgccgagctgtgaccatggctgggatcctcaggtggagcacctgtggcagccatgccgggaaagaagggggcgctatgggtctttggaacacagaagcctggggtcattcttcattggccatcatacccccagttgcacagccatcagggaagactctgaagggaaccagctctctggagctcagacctcagaggctaaggatgggtttccccctcctgtaggcatctccgtctcctccacaggacaatatacaacattaaggatcctgggtaaatgattgttcatggggctgcgttttcaaaatgtcccactttgcaaatgtccgtgcacatccgcagtgggtggaaatagttgatagagaacaagaaggtgtttagtgtatggcttgcctctggggcctcatgtggtcttttctctgatctgccttgggggatttggaactgtgccatgaaggtgcgagagggcgggcttcgaaccgagagcttgaattccatcgcccaccctcaagtctatgtgggtgctggagcgcatcggagggaagccaggagtctctgcaggcggcagccttgccgtgtgaggagcttgcatgtggaagggggaggtgatagtccctctgaagatctgtttctgttatgtaaggcaatttagcatcctgctccctaggaaatttcttttggagaaaacaggccatgcaaatgaaaaagtctaattgggtgattggctgcatttggtaacatgtgcttggagggcagggagattggctagttgtaaataaacatgctttctctgggcggttgacccttctgcgtggactgactctgaggtttgtccccgacagggagcaggtggggtgaatttcttgatttctccttagacaccagttactatgaaatcactgattcttttcagctggagaaggatatgctaggggttcttggaggacataccagggtgcaggatgttgggatgaagtttaataagggtggtcttggcagggtttcctggaattttctgtctgggggtgcatttttccttttttctgcccccatagcagctttctgctcattgccaaatagcccccttgtcagtgacgggagaaatttggtcttacaggccaaccttggtctctttgcacagcaaacccccacgcattacacaccactaggtacccatagaccctaactgggtggcgatactggtccgcagaagttttgcatcttgattgttaagcttttgagaacccaaggagggttagaaaggaatgaaaataaacctagacagccaccggcagctctcaaggctgtgggccacagagcagcctgaaaaaaatgtttgctgatcgatttaaaaagcaatcctaaaacagaaggaactgccgtgttgtcttttctaccaaatattgtttggaaatgtatgacaaaggtgcatttgattactttttcctgtagaaggtgttagcaggtagagctggtgactttagcataaaagtagagaaagggaaccaagtaaaaggagattgtgccagatttttcaggaaagccggtaacattgcctttgctgctggatgggtgtgtgtctctgtgtgtgtaagcgtgtgtgcaaaagcttgttctcctttgccttggagaaggtggcctgttggtgtgtcatgcacacaaagggagaggaaagccgtggaaaatagtgattgtcctttgctggcttcaaccaaggtgacctggaggacacgttccccttcatggcatcccagataacgtcctggagcacataaccttctctggaacattcagatcccactgcaggagcctaggactgtggcatgctcctgcctctgggcctttccatctctggaaccgcctgaccctgctgcaggctctgagagtgtggtgtcaagtcaagggttgacaacatcaacttcagggccgggaaaatccgcgtttccaccgggctcatgggtggatgacataagcactgcaggctgtttcttcacatgtaaaggaggtagcagaatttgccttgtggtgggtcatgccctcagtgcagtgtctggcaccctgcatattctcaaaaaaggctggtggcagctgtgaaggtgctgaggagggagtttgaggaagctttgcctctcctgtcttcccatgtcacccctttgttagggaggagccacatcagctacaggccagggccctagagagctgtagcccctcacagtggcacttgccacgaggctcagcatccccacttcccacatctaccctgtcgtctttcccactcaaaaactggacatcatgaactcttatctgcagactttgaacatccttattagaaagggctgcaaaagtgtagagagatatttccctgagaagcttctcaacaacatgaatgaaaaaatagacgagctctcttggtttgcaaatgctcttaaagttgagggcaaaaatgtgaaaaagaagagtctttttttcctcctcacccacggtgaggtcagaggtggagttgctttaatagtaaacaccaaacacaggctttagggctggaaaaagaactgctgctgcttcttagtgacatcacccttcccagaagcttgaactgagttaattttagttcagttcagtttctaccagcccttttaaaaaacattttaataactatttattaagctttctgtaagcatctggctttatgccagaggctgtggacttgaagatacataaaatagtcaaattcattcctatcagatggattatattctagtacaacgaaggcaagatttaaaccaaaagaatggccactgccaagcgttttggctcacatctatagtcccagcattttgggaagcagagacaggagggttgcttgaggcaggagttcaaaaccagcctggataacataacgagaccccatctctacaagaaatctttttttaaaaaatagctgggcatggtgatgcacacctgtagtcccagctactcaggaggctgaggtgggaggatcacttgagcccaggagctcgaggttgcagtgagatatgatgacaccactgcaccccagcctgggtgatagcacaagaccctgcctcaaaaaaaaaaaaaaaaaaaaaaagcttcatacacacgttcatacacacgagtactaagtacgcaagtaagtgctcacacgattagggtagaaagggctggaagcccatcaggaccgctcagggctctctggatttgttgtatatgttgtgttggcacctccttggcttgactgccccaaatagaacctgatgtgaaggtggaagcagttatgtttccagttgcctttgcaaagccgttattgcaggcacaatctttaaatgtagacagtgggtttccagaagtcctgctctgcttcaccttggtttgttgggcttgttccagaagaattgacctcctaggaatgccctgcccttgctggaatgccttggaagagcacagtgaaagggaactggggtccattgaaggcctctcgctgcccaggcagagggagatgggcttcctggagcattggctgggccacagctcctccctcattcaacacacagttgagagcatagagtattgaaaaggtggagtttctctaatcagtttggatgacttttcaaagaggaatcccattgtgtcttctagtatgtgtctaagtgcatatgtttgcttctgatttgtaggataaaaagcccaaagaacaagaaaaaagaggggattttcttcatcgaccattctccaagaagttggacaagaacctgccctcgcacaaacagccctcaggctcgcttatgacacagattcagaacaccaaagccctcctgaaggaccggaaggcctccaagtccagcttccccgacaaaggtgggtcagctctggggactctctcaggccactcgtgttgggctgtgtgtccgctgtgtagccctcacaggggatggtcgaatgggccctagagcagagatgattcctgtgcccacagaaaagcaggattaatggacctgaggttgcctgagcacagtccaggaccaagctgtgtggcattagccatctgtgcaggaagaatttgagaaaacagagatggggtgcaaagtattacggaaacagaaattggggtggatgatattgtcagaacagaggttgggaggcacagtattgcaggagcagagatcagggtgtgtggtactgcaggggcagagatgaggctgtaaggaattgtgggagtagagatggggtgcagagcagagaccgggtatctccctgagttcaaatcccagctctactgcctgcagaggtccaagttcctttagtgctgaggatcttcactggattatttgtaaggcctcccacctgttggagctgttgggtagatgagatgagatgcatatataagctccctcacctgagtcagaatccagcccatcacagataactgacaaatatgtttccctcctctgggacgagtgctaaaagatgcaaaaggcagaccttactgggcacaggcttaacacatggtagaaacgccaagaggggacacaggagctgagggcgtcctgaagcagagccatgaagtagaggagaggttcttattactgagggggatgagacacttcttggagttcaatctcctaaaatatgaaagaccaggttcagagagggccgtggctgtctgagatacactcaggtgtagcgggcagttagtccctgagcgggacttgaacctgcctcctgtccttctatctcccatgctgctcccggagagaagccactgtacccactttgcccaaagcaacctgctttccctggggcagagcatgcagtggatcggggaggggcagcagtgtccatgtggcagctggaacactggagaccttggccattaatgaagttttacttctttctgctgatgcatctcaggtgcctgcgccggcctttcatttcggtgcctgtgtgtttatttctgcaaggcagggaggcttcccagtgccctcagccactcccaaaatcgatcccagtgggcaggagcttgctcctgcagctgggcctccacagagcctataaaacgttatgggagaagaaagaagctaagacagagcttattccgcatgaacttggctttatttccctcatccccaaatctgtagggggtttcccctttcttttctggcccagtttccaaacctggattctagtctatgccaaccagagacagaaaccatggggatctggcaggttgccttaactgtatggatggatgatattcttcccccgttcagaattggatgaggttccatccagatcaaaagtcacgagggagccttaaaagggaaggaaatcctggcacatgctccaacacagatgaacctggaggacattatgctaagtgaattacgccagtccctaaaggcggatactgtgtgattccacttatatgaggtccctagagtggttagattcatagagacaggcagtaaaatggtggttgctgggggtttcagagaatggggatgtatatggggtgttagatttgcaacaggaagacagttctggagattgattctacaacagtgtgaatatacttattattgctgaactgtacacttaaaaatggttaagatgataacatttctgctacgtgttttttaccacaataaataaattttttaaatgtcacaagggaaacatgtcttccactgtgggctgtccaaggaccagattggcaggaattcagtcaagggaccttggtgtgcttctgggagttttatggatgtgctgttgagtgcatgtaccttttttattccaagatcctttggcaaggtccagaatttttttttcttttttttctttttttgagacagagtctcactctgtcacccaggctgcagtgcagtagtgccatcacggctcactgcagcctccacttcccaggctcaggtgatcctcccacctcagcctcccaagtagttaggaccacaggtgcatgccaccacaccctgctaattttttaaaatttttttagagacggggtcttgccatattgctcacgctggtcttgaattcctgggctcaagcagtcctcccaccttggcctcccaaagtgctgggatcacaggcgtgagccaccgctgcctagggtccagaattttaagcaaccaaaagcagggacgatgttaggctggggccatgaggcaaattggaatccaggagacgtcctgtcgccagccctctgtccctccatcctaggaagactgcccgacctctgtggggagagtgacatgctgctggtgacttttgcaaagtagccaaggctgtttgccggttggtttcttctgaccttggcgggaactgtctcagttaagctggaggtcacagcaggcaggagaagggccgtgagcactgtccggacgtcctcatgattgtttatgctttcttggtgtgcagattcctttggctgccgcaatattttccgcaaaacctcagattccaattgtgtggcttcttcttccatggagttcatccccgtgccaccgcccaggaccccgaggattgtgaagaaaccggagccccatcagccagggcccggaagcactggcatcccccacaaggaagaccccctgatgctggacatggtgcgctccttcgagtctgtggatcgcgacgaccacgtagaagtgctgtctccctctcatcactacaggattctgaactccccggtcagcttggctcgcagaaattccagcgagaggacgctgtccccgggtctgccatccggaagcatgtcgcctctccatactcctttgcatccaactctggtctcttttgctcacgaagataagaacagccccccaaaagaggagggcctgtgttgcccacctccggttcccagcaatggccccatgcagcctctggggagccccaattgtgtgaaaagccgaggccggttccctatgatgggcatcggacagatgttaaggaagcgccatcagagtctgcagccatctgcagataggcccctggaggccagcctgcccccactgcagcccctagcccctgtgaaccttgcctttgacatggccgatggggtcaagacccagtgctaacttgggccagcggggtttggggtatctctagaaaacagcaactgaacagagctccacacatctgtcagggtgtgagcactccaaggcctcgcgtggagcatccttagtcccacctgtagctgaatccacagacccaaagcctgcacaacccaacctcgcttagggacccccagagatgctggaatcgctaggagggttggctccaggggcagccaattcctatcattcagatcttccttcctcccaagtactcaccaaccccttccacttcccacttcccccaggcttggggggaaaacagggcatgagccttctggggcactcagattatggactgttaccagatctttcttcacgctgtgctacatgtgtgcctctcacagcagttggccacagttacagggagagaacaatatcacagtcattcatccaggccacgtttcctctgcggagtgtagcagccctgcctttcatagcagggattacctgaaggccagcaggagccgggggcaggcccaggatcctcagaggaagatggagaggagcttcggaccaagatcaaaccaaacagtggggaccccaacagaagagaaagactgaaggagacactcatttcccaagcaagattttgatagatttttgttgttgttgttgttgaaacatgctaatgattgaattatcttttccaaagattttttttaaatgtgatgtcggtaaattgaaataacataattttttaaaacttggatggagagatgagaagcaattccaccaaactcatgttttcacaggagggttcagtgtggagagcaaaaaagctgactgtggtgatttgctgagtgctgtggcccacaggcagggcaagtctcggtggccctgtgttcatcctgttgtttaaggcatagccctgatccttctggaaggcatagaacacggttacagctggttctgtagaaagagggaaaagatgattgtgacaattcagagcataactcagatggcgagaaggcagcattatctctgtgcgatgctgatttcaagctgcccacagaactggtgcggctcagagctcggcgagtttgctgggagctgggagcaggcttgcctggcagagaacctgttcagatacaggccagtttcttcttcgaggaaagccaagctcctcaaacagggttcagtccacgttgtgttttcacacctttctccaaggatcgaaccaaagatgtgtctccagtattgtgtctgtgcccctgtgtgtgttttgtggacagccgtgttgtctgactgtatccagctggcacttgacagggtgcagtcattggtgagaagaatcagaaaaagaagacccatcagcacaggttggataggggttagtgtaggagaccagttacagaatggcctggagtcttcaacttttgaccggtgcaggtgtgaccagagaccacctctgtggccacctcagatagtcatctcagtccaaggatcccaaaacacaaatctagaattgcaaagccagcctttatttccctggcaggcagccttgccagaaggcagagaggcagttctgaatcattctctcattcaccagtggtgacatccttcagtccctcacatctctgacagagcgggacagaatggatatttggctgaccttggtgagacctggagctgcctgtttcttccctaggggatcaccacggctctagggcattctaggatgaggtcagaccccttggccattggtgttattttttgtatagcttcagactgggttccagaacttaccattgaaaacagagcttttaggccaggtgtggtggctcacacctgtaatcccagcactttgggaggccgaggcaggtggatcgcttgagctcaggagttcgagagcagcctgggcaacatggtgaaagcccgtctctaccgaaaaatacaaaaaaaaatagctgggtgtggtggtacgtgcctgtagtcccagctacttcggggactgaggtgggaggatcacttgaacctaggaggtcgaggctgcagtgagccaagatcatgctactgcactccagcttaggtggcaaagtgagaccctgtctccaaaaaaagaaaatagagctttataagcagagagaagaaaataatcatctaagaccatctctccattcgacatgaagtgtaccttttctaaagacggtttccagctgcaacggctccactttgcaggcttgcagggtgtatacctgcgcattgggaacttgctggaacccctgatgcattttccttgagagcaggggtacttccgccttgccgttagcttgtggagaacgtgcttcttattcctggcaggcttcaagaacagctgcacatgtgccgctaactgaccgcgttgccattggcgacctggactctgaactcaggtttattctaaacccagtgagaggtgagggggagtgatgaaaggggatcagctgtatttgtgtgtgtgtgtgtgtgtgagcacctgacaaatctatgaaaccgagtgaaaggagaaatgttagattctttattattttattatatttatatggaaagctcgactctccctttggtaagtccgaagcatgttgtctgttcgaccgtgactgtcttcctcagtctgtgcctgtgattccagtcaccctgtagttactgacagaaattgactggactgtcattgtgtgaagtctaggaggaaatgtccattttaattgtatgatttggtcataagtaaggactatatttatgtcaccattattagatatatgtacttttgtaatgactgtgaaatacacttttccctcactacgactgcttctttatttgctgataaatcttaaaacaactaagtacgttgcaaataatagtacaggtaccatcttttatgtgaagttctttttctttttttgagacagggtcttgctctgtcacccaggctggagtgcagtggcacaatcacagttcactgcagcctcaacctctccagattcaagtgatcctcccatctcagcctcccaagtagctgggactacagttgtgcaccacaatgcctagctaattttttttgtattttgtagaaatggggtttcgccatgttgctcaggctgatctcaaactcctgggctccaacgatctgcccaccttggcctcccaaagtgctgagattacaggcgtgagccactgtgcctggccttatgtaaagctcttgacctagcatctgactggaaacaagcgggaattgcattggggggcattttctgggccagtttccctgccttattttacctgcaataggtgtgcctacaaaagtctttctgacatacacactgcaggtggcagttcaagaagaatcaacctttttcatttggggatattaggatcttccttggagactctgaaaatggcacacaaagaatggcagttatgaacgtgacttctagattttgtccttgtaggaggccttggtcatggataggggaagagggatgatgggatggaatgggagggtgggatctagatgacctcttgaaattgtcccagttactgcttccttcataactgttcacaaaacgtttttcatatataccaccttgtttcccctgggaagtgaggggacgaagccttagagggtgacatagctagaaagtggagaagctcactgttcactgtgcaaagccccagtagtcggattccggggaaaagaacaagtatctagttttgatgacaatgttttcttgtaagaatcccaacactttagaatagaaaaggacctaagattctctggctcagccccagcctttctgaagaagggaaaactagggacccagatggtttaaggacaccccagagtccccagatgagctggcatttgagctggtctggagcagagtttctccctcaaagaacacagagaaatcagagagtggctgccatggtcagagggggatgtcaacaacagatcaagccgtcatcacaacaggtatttctgaagttcctgcagggactaggtcttgcatttttaagtccttttcaaaactgtgcagcttcctgaaccttatgctgtttgtcccatccactcttgaagctggggaaagacagctttctttgggaactctgtctttctcagttgacttcccaagtaagcagcaaacccctggatagccttgttatctactttaggtattaagaggctattgggttttactagattaaatcaataaaacatttcctatagagccatatcatacactgaagcaaattcagaaagaatgcaaaactgctatcttttgggggagtctggaagcctgttggttagtgtatttattttctttgtggggtcttctgtgagctacaggcacagtaagaataattcagagcggtactgggagttggttcaatttcatgtcatcacttttcaatgaagggagtgcatttcctgagtagtaaatgagtatattatttgtggcagcttttctgttaagggagctttccagacatctggttgcaaagacaaataggatatatatttgtacttcttctctgtggacatgtttttgtgacacacagttatctctaggagttgacgtctgtgggcactaagggactgaggttgggggagaaagctgaggaggctttggaagagaaggtgaggagcatttcaggatttgcagtccccctccacatgtatccacatctgagctggtggtgttccaataatgaggcatttggggcaaccaattttggaaggatagaatagctttatgtggagcaaacttgaggatcaattggagttgagtggtttaaaacttaaagatggcacaggaagctgtatcatttacaggtgaaaaaaataaatgggtctgacttcagggcctcagctctttgtatttcctacttggaagatgggctattagcaattttgaaagcaaaggctttggtttacatttaaactctataattttttttaaaaatgtgttctttctagtcttgttaccatagccagctggaaagggcaaattgcaagcctatattgggaacaagtcttcttgccgaaagtagggcagtgaagttcttggcagatctgagatgagaatgccttcccctgactccttcatcagtgttcagtgctcacctcctctggcaaccagtatgctagaagattaggctttgctatgatcacaaattaattccaaatctctgtgacttgcccaataaaggtttatttcttaaaatatttttatgaggctgggctgaccacaaaacggctgtcttccatatggtgactcagggatccaggctacatccaacttgtggctgtgtcccctcaaaatgaaacgtctttggctgctccagcacaggaaggcacggctggagagttttccaccagcccttaaacattctatgaggggactcatcacttctcccacagcccattgactggaactggtcacactgccttgtctgtgagcaagaggctgggaaatacaggagcatagggctacttgggatgcagctaatgtttctcccatcttagggaaggtacagctgcctgccatttatttgttctttgtttttgtttttgcttttgttttgagatggagtctccctctgtcacccaggctggaatgcagtggcgcaatctcggttcactgcaacctccacctcctgggttcaagcgattcttgtgcctcagcctcctgagtagctgagactataggcacatgccaccatgcccagctaatgtttgtatttttagtagagacgagggtttcaccgtgttggccaggccggtcttggactcctgacctcaagtgatatgcccgccttggactcccaaagttccaggattacaggcatgagccaccgtgcctggccgagatgcctaccatttaaaggtaccccaaaactggactagccttttcccattgtcacacaattatagcacctcttagtaaagagttacttttttaaaataaaagaattagcattggtaaatgttaatatttaaggagagtgttttgggctgaattctttcctccacaaattcatatgttgaaaccctcagccccagtacctcagaatgtgactacttagagatagggcatttaaagaggtgagtaagttaaaatgaagcctttagggaggaacctaatcaaatctgacaagtgcccttataaaaatgtgaggtctgggctgggcgtggtggctcatgcctgtaatcccagcactttgagaggctgaggtgggcggatcatgaggtcaggtgtttgagaccagcctggccaacatagtggaaccccgtctctactaaaaatacaaaaaattagctgggcgtggtggcaggtgcctgtaatcccagctacttgggaggctgaggcaggagaatcgcttgaagctgggaggcagaggttgcagtgagccaagatcgcgccactggcactccagcctgggcgacagtgcgagactccatctcaaaaaaaacaaaaaaacaaaaacaaaaaaaaatgtgagatatggatacacaatgggacaccagacggaggaaagaccaggtgaggacacagagaaggcagcctcaggagtgaagcttcaagacgaaccagctctgctaaaaccttgatctcagacttccatcctccagaactgggaggatataaatgtctgttgcttagatcccggtgaggtatttcattacagtagcccaggccgactaacacggggaaaaggtcagatagtaaaatttacatcttctaggaatctcatatgttttgccccatatgccaaatttccatttatccttttctgactaaatcactcccagaaaatttctcttttttggagtgaaattccaccctctcctctcctctccttttcttttctttccttttcgaagcagagtctcactctgtcacccaggctggagtgcagtggcgcgatctcggctcactgcaacctctgcctcctgggttcaagcaattctgcttcaatctcctgagtagctggaactacaggcatccgccgccacacccagctaattttttgtattttagtagagacggggtttcaccatgttgcctaggctggtcttgaactcctgagctcaggcaatccgcctgccttggtctctcaaagtgctaggattacaggcgtgagcctctgtgcccagcctgaaattccaccttttctaagtgtttcttgtgctttaagctcagtgtgccaattattttcaagtttctttcttcctttaatccagaggtctgcaaactttttctgttaaggaccagaaaataaatattttaggcttaggagatgactgttgcatattagtctgttgcgtattactctgcattgtttttaagtttagtttagtttttgtttttgctataaccctttgaaaatatgaaaactgttcttatctggtggacctacaaaaacaggccatagcagattttggccctcaggtagttattttgctaacccctgatttaatcttcacaaaaactccgtgaagtgtcatattttctctattttatagattagttttgtgggttttatagattgtttttgtttttagtttttgtttgttttttgagacagagtctcactctgttacttatgctggagtacagtggtacaatcatggctcactgcagcctcgacctcctgggctcaagtgatcctctcacttcagcctcccaagtagttgggactacaggcacatgccaccatgctaggctaattttttaagttttttgtagagatggggtctcactatattgcccaggctggtttccaactcctgggctcaagcaatcctcctgcctcagcctcccaaattgctgggaatacaggcgtgagccatcatgcccagttgacacaatcaggacttctgcaatcacacaccacaactttcatgttaggaactcaccacttgaaagacagagagggctccttttgtgacatctgggccagtgggctctcagaagggcctgtggctaatggtaacaaatttgttaagagttttgcaaaatgattcaatctaagggaacttggaggtggggagagaccctggctcttttctttgccactccttccttcgttgctttttgtagatttccagggttggttgccagccacaggaatggcagtgctacaggagagccatcctggtctcgagtctgtcattactatttgttccccacctttagattcaatcctgtcttcatctgtgcagaatggaacatggccctagtccccaagctgttttccattcaagctgtttcccttttctcttttgtgaatagcctctcaaaaatgggctcttaattgcttataaaaagacagagcttactcaaagtctcaggaaacaagtctaaatctggagcagatgtgaagctggatgatgcttgtagacagatcattaccattactcacaactgggtgacgtgcgggccattgggatggacgagtgtccccgccagtgaaagatgaatcatgtcatctgagtcagagaatttcaaagagccattcagagtccttaccacccagagccccttgaattatctgagccattctcacgttcaaagcattaggccaactcagagaatcacaggaacaatggtggtcacccagccttgggcttagatctccagaagtttgaatgaagaaattttggattttcagattctcaggctaagcacaatgcaacttgttggagcatccttttcacaactcactgctacttttttttttttttttttgagacagagtatccctctgtcacccaggctggagtgcagtggcgcgatcttggctcactgcaacctccacttcccaggttcaagcgattcttgtgcctcagcctctcaagtagctgggactacaggtgtgcaccaccatgcccagctaatttttgtatttttagtagagatagggtttcaccatgttggccaggctcctgacctcaggtgatctgcccacagcctcccaaagtgttgggattataggtgtgagctaacccacccagcctcactactacttttaaaacaaaacaaaacaaaacaaagcatttttacctaaaactaatatattatgtatcccagatacaaaatcagttgaattttgtcagtacaatccttattgtcctctaagcattcagggaatcattttaataagcaggtgatgcaattgagaccagaatggagaaatgatgcattgaagaactcacaacttgtcagttacagcctctgccttcaagctcagttctcctcccaggaacctggacaaagaacccagaattaaaagaggatctggggtgcttggggtgtcatgatgtctgaggtctactcagtcccttttgcaaaattttgcacaacagaaagggtggacatggtgatggccatagtaggaagaaggaaattgatttgtgaggagtgtttgaatgaagagggtgtatgtgagtgctcttttcaccttcctaagcttggtttgtcttgccctcctctgagtactcctagcagcaatgattacgtgtaataattgttacattactgtttctcccagggctctgggacactgtcttacatatctttttaactatacccagtgatccaaccacgtggatgaatgagtagatgatggatggatggatggatggtgaatgggtgaatgggtagatgcatgtatagatggatgggtagatggtgaatagatgaatggcaggatggatagacaatgaatggatggatgggtaggtgaatggatagatggttagatggctggatggaaggatagatgagtagatgatagatggttggtgggatgaatgggtagatgatggatgaatgggtaggtgatgaatggatggatgggtgggcaaatgaatggatggatggatggatgaattgagttgataataaatgttaaggggagttagatgaaccagattagtggatttctgggagggcagttcaaggaaaggaaaatacttccttaatccacagtgtaaactctcaaatacacaataaacaaaaaaatagagggcctggaaaacaaatagagctctaactttgggtacaaatagcctttacagcattgcctcctcctaccatggatccactcactcaccaccctgaaagcaaggaatcacaaaccccggttgcacggtgaggccattgcccctgttgtcaaacgcatgtgtgtctatttgattgttttcttttggtgaccttacagggatttggcaaggagataaggtgactatcaaataagccagaacaggtaccctgccactctctccacccacacagctgtttatgaggccagtgtactgaggcccaaactgctctgtaaagtcaaagtaaatcctgactgaagtactgtgttagcctcactttcatgccttgtcagcccaagcttccagctgtgttgtgcaaaaccatctcaaagctatagttggttaattaggcattttcacaggagatgggtagctaatcaagatgatgttcacacagctatgtctcaccccagctaacctgctcacttctccactgctatgggctgaattatgccccccaaattcatgtggaagcctgtcccccagtacttcagaatgtgtctgcatttggagctagggcttttaaagaggtgattaagtgattaaggtgggccctaatccagtgtgactggtgtccttataagaaggggaaattgggacacacaaaaagacacaccagggattcaggcacacagaggaaagaccatgtgaggacactgtgagaaggcagccgtctgccagccaaagagagaggcctctggagaaaccgaacctgtcaacaccttaatcttggactactggtctccagaactgtgagaaaatacatttctgttgtttaagccactcagtctgtggtgttttgttatggcaaccctggtaaactgatatacccacaaacccaggtgtggaaataatgaagccccttcacggagaacaaacaggctgtttattcagagcttgctgtagcaagggagttggccaccatcacttgcatggggcagagactcaaaggcaggcagaggagtgggaaagtgtcattgggggaaaagggaaggcttcaactaggatctgactggaggttgttggcacagggaaactggaggtggcctaattagcagtaggacattgtattagttcattctcacactgctataaagaactacctgagactgggtaatttataaagaaaagaggtttaagtggctcgtggttccacaggctgtccaggaagcatgattctggcatctgctcagcttctggggaagcctcgggaaactgacaatcatggtggaaggtgaagaggaagcaggcttgtctttcatgactggagtaggaggaagagagcaatgggagagctgctacacacttttaaacagccagatctagtgataattcactcactatcatgagaacagcaccaaaggggaaaccctcccccatgatccaaccacctcccactgggccccgcttctaacactggagcttataatttgacatgagatttaggctaggacacagacccaaaccatatcagacattttatgtgattttggttttggcgaaatatttgactttttttctgagatgaaaatcagggcaaaagtaggaaagctggcagtcgttgaccaagtcctgaccactctgggcccacagctgcagaggtttggcttcatggatcggttattgcagaggctgagggcctgagttctattgctgtgtgtgatctggccgtcgtccatttatgtattcagtgtcttacaggagtggtgggatgtcttctcactcatgtctgcctggctgcatttgtttcctagggctattataacaaattatcacaaacttgatgtcttacaacaggaatgtattctcccacaattctagagacaagaagtctgaaatcaaggtgtcagcagggccactctctctctgaaggcagtaggggaggaactttccttgcatcttcctgtttctggtggctcccagcaatccttggcattctttggccataggagcattcctccattctctgccgccatctttacatggtgttattccctgtgtgtgtcttcacatgtccttctttaaggacacaagtcactggatctagttagggatccaccccaacccagtatgaactcaccttaactaattacacttgcaataactctattttcaaataagcttaccttctgaggtcccagcagacatgaattttggaggagacactattcaacccagtatactagttaagggccctcttttgctgtcaccggggcttaacgcctgatgaatcaggacctgacatggggccacaatgggggattcaactctgtgacgtcttgggacatccagagtagaagatggtaggatgtgaccttttgggtggaaactttgggacccttacgaaagggaggaaaggaatccacatctgatcatgtggagtgattgacaggcccactccaaggaacacagatcctggggccaagctgatgatccggtgatctcctaacatagattttcacaaaggaatcagagagacaactaggatgacttgggggtcggggtgggggctcttgattgtgggaatgctgtgccaggggtttatggagtcttgacataacctgtgagtcttcaaaaagcacatagattgtcaacatgagttgttgaccccaaaactgtatctctagaacagaatattccctggagcatcaggcaggtttatcaaacccagaggagatccacattcaattcgttatgtccagagccaatgagctcattccccaagaccaggtcttcctgtgctccctcttgtatgatgaagggcatcacagactccactttgcccaagcgccaacctgagcatcatcctgaaccacactctcctgcatctagtccatttacaaatcttaccagttgtacctcttgtttgcttcttgctaagtcaagtgccccaaagatgaagggctatcaagggccaccagtaccaactccagaggggaggatgaagcccactctctttctatgcttgacgtttagcatggtgcagtgaaatacacatcaaatcaggaaccatccacaaaacagggatttgaggtaataaggtggtattgcttgaatttttgtcccttttgaaactcatattaaaacttaatccccaatgtgacagtgttggggtgggagtcctttaagaggtgattgagtcatgagggctctaccctcatgaaggaattaacccattccccagttaatgggttaatagattagtgatttatcactggaatgggttagttgtaggagagcaagttggctgtctcttgtgagccccttgccatgtgatgccctgcaccacctcaggactctacagaaagtgcccaccagcagaagactctcactagttgcagcccttcggccttggacttcccagcctccagaactgtaagaaataaatttttttataaattgcccagtctcaggtatccagttacagcaacagaaaattgactaagacataggatcaatgctatgattaaagagttaatatatgcaagacacttaggacaagctgtacaaagtgggtgctacagaagcattagctattgcatggtggtggctgtgcgattgtactattggatagagtcaaggggtctggttctcaaccttgatctgcattaagcagctatggacaagttgcccccactgccccccaccaccaagggacagattcctcactgaaaataaaaaacaaaaaacagaacaaaacaaaacaaaatcagaattgattttggccccttgagagactgaacacatgttctagtgtcactaccatttttcaaaatggttttgtggaattccgttttgcccacggaattcatcatgttttttttttttttaacaaaaatcaactttttattttgcaataattgaagattcacagaaaagttacaaagatagtatagagagtccccaaatacccctcatccagtttctcccattgttagcatcttatataatccattacatttgtcaaaatgaaggaagtggcattgggttactactattaactaaactccagactttacttgggtgtcgctagttttttccttaatgtcctctttctgttccaggatccaactcagggtactcaattgcatttagttgttatgtctttacagtctcctgtggtttgaagcaattggtcagtcttttcttgcttttcatgaccttgagagtcttgaggagaactagcccagtatcctattgaaggttcccccgtctgggtttgcctgttgctttcatcatgaataaacttgggttatggatttttgttaagaatgccatagaggcgaagtgtccttttcatcacatcatatcagggagtacatgatagccagatgatattacttatggtattgacctcagttaaggaagagtttaccttaaccatcactcatttaaggtggagtttcccaggtttctcaattgcaaagcttctatttctccctttctctagtctttggaagtaagtcactaagtctagcctacccttaaggtgtgggagggattgagtgccaccccctagaggggtgaatatttacatgtattatttcaaattcttctttaaggaagatgtgtctcttttcccccattattttatttacttgatcatttatttatatcagtatggagtcatagatatttattttatagtttgggttataatccaatacagcattatttatgttgttgctcaaactgttgcggctttggccattgggagctctttcaggctgattcctgtttctttttgacatgcttccttccctttgatttttgagcacttcctcacctcctggcactacaagatattccaagctcatgttgtatttcccttgctccagccctagaatcagccatttctccaaggagccctcgttcattacattcttttgaatgttaccaatagtggcaaattcaatttctttgtgggtggaattaacaaccaaaagtcaattggaatcatatctggtgaaatagattggtaatcaagagcattaaataacatctttcatcaaaaactgtgtgacggcatacaaacacatatttatagcagcacaattcacaattgcagagatatggaaccaacctaagtgcccatcaacaagtgagtggataaagaaaatgtggtatatgtacaccatggaatactactcagccataaaaaggaatgaaataatatcttttgcagcaacttggatggagctggaggccattattctaactaagtgaagtaacttaggaatggaaaacgaaatattgtatgttctcagttataagtgggggctaagctatgaaaatgcaaatacataagaattatataatggactcatttatccctcaccccccttcccaaccttctctctcaggtgagggatcaaagacaacacattggatacagtgtacactgcttgggtgatgggtgcactaaaacctcagaaatcaccactaaagaacttatccatgtaaccaaaaaccacctgtaccccaaaaactattgaaataaaaataaaaattaattattaaaccccccccccaaaaaaaaaaccaacactgtgtgacagaaagtaagcattgagcccaaagaattgtcaaggctgagaagcaaacacagccagagtttcttttaaaaaaaggcttggccgggcatggtggctcatgcctgtaatcccagcactttgggaggccgaggcgggtggatcacaaggtcaggagatagagaccatcctggctaacacggtgaaaccccatctctactaaaaatacaaaaaaattaactggacgtgggggcgggtgcctgtagtcccagctactcaggaggctgaggcaggagaatcacttgaacctgggaggcggaggttgcagtgagccgggatggcaccactgcactccagcctgggtgacagagcaagactccgtcttaaaaaaaaaaaggctttaacattttccagtcactttagtatttatgcctaaaacaatctgatcagctttctgcttttgtgggatgcattgagcatgaacaatgtcactgatgttaaaggagcaaatgagcattctcttcacttttgaaataagtatttttcttacgtctcagggatgttgaggctttctacagcgaacgttgatgctttacttctggaccataatagaaacactatgttctacgatcggtcattatttttctctaaaacatgtgctttttgttttttcaaacctcccttgaaaaatcagagcaaatgccaaggcttttgagtgtaagtttatcattcaaaattgttggcaagttttcacagaaatttccctgctgtcccagttctcttccctctgaatgtaacactccggccaacgtgctcacaattacttgttcagcgcactgcctggttcagcacttccacagcccttgtgagtgacgaggctccatggcagagccatctccttccttccttaaaccttccatgacaacccctaactcttgtctttgccatctgtgcttggctctttctccacatattcctttttaacatgtcaaatgtcttgctggccccactgtgttactttatgcaaaatgtgaggctctttgttcctaaaactgctatcatttttactcaggcatgagcacccgcacttccttaccctctggcacaaatctgcctgcaaggcaggttgtagcaagtccctgttaagactggtctttgatttccactggcctcaagggacacctccttgggtacacagaaatccatttcattggttggacagatactcacagtgcagagctagaaatgtctgtgctgcccttagaaggactacatgtcactcagctaggagacacccccagaaattccccatcaaactctattccacagagcccccatcaatgacagtaaaccatgccagtactgccctagatcaatcccacacagttgcagcgtgagtctcttctctctttcccttcttatcccaacttacccaaatttaatgaaaatgctgaaatcgaaactgaccgaaatagaaattgctgctcccatatttaagcactgttcagtgcatcttgctcccccacattctggattcttctcccactgcctcattgaaattgctctctagcttcaccaggagctcccttgtggcaaaatataatggacatttttcatttatttctctgggctctctctgtctgtcatggtagaaattgtgtgtcccctgctacccaccccaattcatgtgttgaagcgctgacctcccatgtgactgtatttggagacaggatctttaaggagataatgaaagttaaatcagatcataaaggcagggccctaatccaataggactgatgcccttctaaggaggtgggggtgggaagagagagagagagagagagacagaccagggatgcgtgcacagaggcaaggccacatgaggacacagcaagaaggtgaacatctggaagccaaggagaggcctcaggagaaaccacacctgccaatttctggatcatggacttccagcctccagaactgtgagaaaatcaatgcctcgtggaaggcacccagtcttgtatttgctatggcagcctgagcagactaacacacgctccttctagaaacactctattatcccagctctgtgattctcttcccacctttccaacgattcctggagatttcctctttcaagtattctgagtgttgctgtctctgtcttccatccacagccttctcactcatagcatttcaagcatttcaactcctattcccaagccaaagtcatcaacatctatgtcccctggaacttcagatgtgagtgtccaatttctggttggaagtctcccaggtatctcataggaacctcaaagtcaacacgtgcaaagctgaacttaccccttttcacctgtttgttgttgttgttgttgttgtttgtttgtttgtttttgagacggagtttcactcttattccccaggctggagtgcaatggcacaatcttggctcaccacaacctccgcctcccaggttcaagtgattttcctgcctcagcctcccgagtagctgggattacaggcatgcgccaccacgcccagctaattttgtatttttagtagagatggggtttctccatgttggtcaggctggtctcgaactcccgacctcaggtgatccgcccaccttggcctcccaaagtgctgggattacaggcgtgaaccaccgcgcccggccctgtttcacctgttttgcctgtaaatctgcccccatgcctatggcctctatctgtatttcccagacgcccccaagccagaatcccggccattgtgctaagttgtcttctccctcggttcccacattcaacaagcctcaagagtttgctctgtcccatcctcactgaagcctctccccttcttcaatagccatcacacaggcctttgttgcctctggccaagcctatcacagcaaccatctgatgggctttctcaaatctatcccttgtcctaccggccactgcccttaaccaatattaaattttgaccatgtcaatccttaacatttgacattaaacattaaagcttaacatctttggtgcctctggaataactctcagctaatgtcctcactccttagcaagaatatggggcccagtgcagcgtggctcctgctcaccctccaagctcaacttttactcttttttgcctgcaactttgtgctttagccatgctcagggtgctccttcccgcgcatctgctgtcttctctgagggccccactcgtgtatgtctgtctctgtgtccaaacttctccttttataagaacaccagggggccaggtgtggtggctcatgcctgtaatcccagcactttgtgaggccgaggcgggtggatcacctgaggtcgggagttcgagaccagcctgaccaacatggagaaacctgtctctactaaagatacaaaagtagctgggtgtggtggcgcatgcctgtaatcccagctactggggaggctgaggcaggagaatcgcttgaacctgggaggcagaggctgtggtgagctgagattgcaccattgcattccagcctgggcaacaagagcaaaactctgtctcaaaaaataaataaataaaaaagaacaccaggcatattgaattagggaccaccctgatgacttcgtcttaacttgattacctgtctcaagaccctgtcttattctgcttgggctgtgataacaaagtgccatagtctgggtggcttaaacgacagacatctatttctcgcagttctggaggttgcaaagtccaaggtcagggtactggcatggctgagttccagtgagattcctttctcctctctccctgtgtcctcacacagcagagaaagagagagatctaatgtcttccttttctaataggggcactaatctcatatggagcctccattctcatgaccaaatttagccctaaggttctacctcctaatgccatcaccttgggggctagggtttcaacatataaatttggggggacaaaaatatttggtctataacagaacccgtcttccaataaggtctcattctcacctcaacatatggatttaagggagataacaattcaatccaaaacagccagctagctggggggtgagaaattttgttcaaactttcccacagtgactccagagaaaacttttctctgcaatttgtgggatgggctggcttgaggatgggagtgtggaaagggacagaggatctgatgaaagataccagagccccgacgttgtgatgaactttatagaaaagcttcctgatcgccagtggtgaaggccaccagtctgttcatggcgatgacattctttcctgcccaggatataacattggctgggactgatgccttttgtttccttcattagccactggtctgtctggttttcatcttatcatgattataataggaatagtgattacaatttcttcaacaaaaatttatttgcatctataacacgctgggcattgtaaagattgttggagattttaagctgtgacttcgttgtggtccttgaatgtcaaaaagagaatcacatttttatgtgttactggaaaagtagcgacttcctaaaagtttttttcaccctaattgtgctagttaacaagctcagaagagcagaaaaaaaaaaacaaaaaaagttaccaccaaatcccatgacctaaatttggtgtatcctcttataatttttttctatacctttagaaatgcatgtgttacccttttatatggtttgttcatttaaaaaattttttattttgaaataattttagactcacatataagtggcaaaaggagtacagagaattcctctgtactcttccccaggttccacagcgataacatttttaaaattttttatttttaaaattgtggtaaaatacaaataacacaaaattgaccattttaaagatgttgaagtacacagctcagtggcgttaagaacattcaggccaggcgcggtggctcacgcctgtaatcccaacactttgggaggccgaggcaggtgcatcacctgaggtcaggagttcaagaccagcctggccaacatggagaaaccccatctctactaaaaatacaaaaattagccaggcgtggtggcgggtgcctgtaatgccagctacttgggagactgaggcaagagaatcgcttgaacccgggaggcggaggttgtagtgagccgagactgtgtcactgcaccccagtctgggagacagagtgaggctctgtctcaatacaatacaatacaatacaatacaatacaatacaatacaatacaatacaatacaatacaatacaataaaaacaacaacaaaaaaaccattctcagtgttacgctgccatcaccagcatccatctccagaccttttttccatcttccaaaatggaaactgtgccaattaaacaacttcaccttccctctccccacaggccttggcgactcccgttctactttctgtctctgtgaatttgactactctagggactcaaggggccctggcttccctgctatgagtgaacttgaaggagcagggaggagtttccaagacacccagtttccctctccctgggctgcaagtctggcaggccactgggtttcctgtgttctgggtgacttctcaagcctagtgacctggaacaggggtgcacagtgggaggacagatgctccctgatgtgtgtttggcattgccaatctccttattagcttattggtgcaataagccaccagacctggaaatctcaccataagaggctggctgacagggagcactgatttctagcgtgtgttcttgaggttcaaaagggaaaacagccatttggggtttgcatagagaatgaggtttcagctaaccatggctgattacagaattgctccagcagtgaccgtgtttgacctcgacctcaataccccagcagctgcccctgctgtgtctgttcagtgaaacaacccttgcaaccacgcctccaagtccgtcaccacagatccctcctgcctgagttttcagtggctgctgtaataaagtaccactggcagggtggcctagaacaacacattttattctctcacagttctagtggccagaagttccaaatcaaggcatccaaactaaagctctttaatgttgggcaagttacttaatgtccctgtacctcactttactcatctgtccaataggagggtaagagcaccccaggacactcctggtgctctgcccagacctccagggatcccttttacccattttgtgtgtgcatcccgcagcttctgtgtgctttccttctacctgctcgcacctgcaaccttcttcagacacctgctaatagagctgcttcacctgcaaaggacatagagttggaagtgccggggactgcgtggtgctccctggagccaatgcacagcatgctggtcttcccatggtggaatacaggcttgcagggttcccacctgaggctttatagagagatacagggcatggggtcctccaggcagggtgacaaccgcatcccagtttgcccaggcctttcccagttttagcactgaagtccccatgaaggtgggtcatagacacactatcaagtcacaggagcctagcaggagcctttctgagtgatcatcctgcccttggcatcaggttcatgtctctgtactcacatggatgatgtgggactctcgccgtggctgcaacagataagaccggcactgttgtggagaagcttagggggtttccagggcctcccaagcttttctgctgcctgacttctccctttggctgttgatggcagcaagcccgcaccaggagtgagaatgaagggggcatcctgggcattaccccccttccttgtgactggtggggctattcctggaggaattaactttggcaccattcagggaagctgtgaatgaaaggcagctgcacagacatcataatctgtagccgggaacaggcaggccgctctggcacccagcccgccccgtctatgtggtgccaacagctcctgggcagacacaaccgggaattttaaggcaaggcctgtatttgcagtcctccctgctggccgtaaaccccggcttgttagtttcaaaggcttgaggtcaaatgtaccattataacaagttagaccagtttataaaagaacaccaaggtgggaggttttgccagtatttgtttcacatcgtcttgctctttgatttaaatgttttgatgaactgccctgatggtcatgatgctggtggccagtgaaatcctaccaaacctttctgtgctaattctgcccagaacatggttggagaatccttaatgatcacaatgcagtaattttccccttttcaccattcggaactattgcaaaactttccaagggattggcctgattccctggggccctccctcatcctggaaccctgatatcttgtagaactgccactttgggaggtaggatgtggatagaccaaagcataagaacaatgcttcatggcgtttctgcaacacaagatcttcatttcttaaccacttcctctttttgagtggaattagaggaagtcgagaaaaaaggggattaggaaattcattccagcatacggaataaaatctgtccttcaacaaatgaaggctgaaagggacacgtgaacatttcatctagcacattcctatattcctgttcttagatgatgctaagctgtcctttcagaagaaacccagcctcttcgctgtacctccaaatcccaattttctgtgaacagggacggaggaagagctgccaacaaggaagttacctaggttttgacagcttattagttctattattccgactcaggctcagggctgcatgggccagtagagtgcgggagagtctgagcaacacagggactggataattttctcctataaaattcaatgctgttgttggcttcaatttcaccaaatgaaatctccaaatgaccaatggcaaagagaaagcactgtcgtctcacaaaactgccttgagttatgatttcaatagattctagctaccgtgcttttactaaattcccaaatacctgcagcttttgttggtataatattatttcactatcactaaaaaaaccccaaatcagaatcatttacatcttgaggcatacccagcgagttacaggcttaaagttaccttatctggtaagagtgaaaaccatatccctctgttgtttttctcaaggaatcatattgtttttcattcctatttctggagttacttgtgaggctgaacgtcttttttttttttttttttttttttgagacaaagtctcactcttgtcccctaggctggagtgctatggcgtgatcttggctcactgcaacctctgccttcccagtttcaagcaattctcctgcctcagcctcccaagtagctgggattacaggtgcctgccaccacacccggctaatttttgtattttaagtagagacggggtttcaccatgttggccaggctggtcttgaactcctgacctcaggtgatctgccggcctcggcctcccaaagtactgggattagaggcatgagccactgagcctggcaaggttgaacatcttatgttttttagccatttgcaattcttccagagccttcgacccacatctgttttcttaactctctcctagaatcattttagaattatggagaattattaagggaaagagaagaagtgcacagtaggggatgaagggggagaggtgaaaccaggtggggagcactgttctcaagccctcccccagctccctctgacttttctttccccagggctagattccctccaccccactcctatttttcctcgaaggccatgtcaagtctcttaggataagtccctcttctcctctaataacttactactcttgatcttagccgaaacgctgagaagtgattcttataataatttgttttgcttttaatcattccaggtaaagggagaggacctttagtcttggatcctgacctccttttaggtgaaacttcctctgaggacaaagtatagtggtcccagtgtccctgtctcatttaaaaagtaaaatactggtagtatagtttgggataagcaaactaagtagtcagattctggcattctgaatcttccttttgcttaggaattgctaaggccgagggttgtctctggctcaacatttgcctgaacgttcagtctcctttcgggtctgtgagggagcaaatgctactgcgggagcctcagggagccctgcccacaccttcctcttcccttccttaaaggtcacgatagctgggttcatcccgtagttggatgtcaagtttgcttttaaaatagattgtaacacttaattcttgctgtcatcctgtaggaaataccacgatccagtggtagcctccaagtatatcaccctgaaaacaattctggtggtctcaaaacagaaagcacagaggcccaattaagatgctcaaatctcatggtttattaaatctacgtgaaacacacaagaagaagcaaggggatagggatgggttaggtagtgtattagtatatatgtatatatacgtatatatgtataaaggggagtatattatatgtatatatatgtatatatatgtatatatacgtatatatacgtatatatatgtatatatatgtatatatatgtatatatatgtatatatatgtatatatgtatatatatgtatatatgtatatatgtatatatatgtatatatatgtatatatatatgtatatatatgtatatatatgtatatatatgtatatatatgtatatatatgtataaaggggagtatattatatatatatatacacacacatatatatgtgtatatatacgtataaaggggagtacattaaatagtattaactcacacaatcacaaggtcccacaataggccatctgcaagctgaggagcaaggaagccagtctgagttccaaagctgaagaacttggagtctgatgtttgagggcaggaagcatccaacacaggagaaagatggaggctgggaggctaagccagtctagtcttttcacattcttctgcctgcttaatatcctggccatgcgggcagctgattagatggtgcctacccagattgagggggggtctgcctttccagtccactgactcaaatgttaatcttctttggcagcaccttcacagacacacccaagatcaatactttgcatccttcagtccaatcaagttgacactcagtattaaccatcacaggtagccacactgagtatagtgtgaaggtggggtggaagaccacacacctcagtccggagttacatgatgttcatgcatcctatttctctgctgtctgcatctacctcccccaaggaatattgaacagcggctcagcaggcagaggtgcctgcaatcaacacttgcttcttttattggagagatgcaggagaaattacacctggtcacagcagcacagtagttcccccgttatctgaggttttcctttttgcagttccatttacccatggtctgaaaatattgaatggaaatgaaatattggtggaaaattccagaaataaacaatatataagttttcaatcatgtaccattctgattagtgtgatgaaatcttgcactgttccactccatcccacctgagatgtgaatccttcctttgtccagcgtctccaccctgtagatgcttagaagtcatctcgatgatcagatccactgaggtattgcagtacttgccttcagatcacctttatttgacttcataatgccccaaagcttaagagtagtgatgctggcagttcagatatgccaaagagaagccgtaaaatgtttgctataagtgaaaaggtgaaagttcttgacttaataagaaaaagatcattgactgaggttgctaagacctatggtaaagatgaatcttctatccatgaaattgtgaagaaagaaaaagaagtgtgtgctagttttgctgtttcagcttaaactgcaaaagttatggccacagtgcatgatgacagagctcagttaagatggaaaatatattaaatttgtgggtggaagatatgaacacacacgtatcttgactgatggtgaccaggttcagtactatctgtggtttagggatccactggggcctgggaacatatctcttgtggataaaggggtactcctgtagtttgccaactagttcaatgaacagttatggatcttatctgtattccttgggcagagcatgtgagatctcgagtgggacatactgagtgttaccggtgggtggccagtaaaaaatgacaaaaccatcagcttagaggttgcatgaccccttgccttataacctggtctttccttcctttccatccttttctatctataattgctcttgctactccattctttttaaaaactcacacatctcttacatgtcactaacttattatctgtacttgacatcttttatggcttctgctcatcttacaagctacttgcttactcgttctctgcacttcatcttttcagttttatacaacccattcattttcctgtcacctattacagaattgaatatcctcaattaatatgactaatgttgtaacttcactttagtgaaggtgacaaatttccaagatttaaaaaaaaaaagtgaattagagttggcttatacttaaggcatctggacatcacatctgcatggaaggttttggcagagtgcacacattgcagttctcgtcagtctctgcccacatcaccggtgggccccaaagacccagggcttacctagattagggtttggaggtggtatctgatctaaataagataaataggctgaggaattgagtatgtccagatgagtgaggctcagtgaagagaactggatgagactcccctgaagggagagagaaatctcatcttctgtgtagtaaaaccttgaaccttgatcaaacagagatctggcctttgccaatggctcctgggagatgatctctaagcccttgagatttcatggcatggtgtgtctttgtttgcccggaagttttgagcaacaccaaaaatgtgatacagtgtgggggcttagggccatgtggtatttgttgatttctggaggggctggagactgaagtcagccatgtgggcagccaaccaagtttaagtgatggagccccattcaagactctagacatcaaggctcaggagagcctccgtggttggcaacagtctgtgcatattgtcccacacccatgctgggagagtgtcactgtcagctccatgggagaggttaatggaagctccacagtgggaactctcttgggcttcaccctatgctcctcttcccttggctgactccgtatccttttcttggaataaaccataaccataaggataacagctttcagtgaactctgtgagaccttctagtgaattacggagcctcaggataggtactgtgttcccttgaactttgcagttagtgtcaaaagtgagagtcctgtggatggatagctcccacactgcatctttccaagcaagagacagacaggaaagggatgaaaaagaatgaagcttagtgtttcccttatgactaagtttgggacttccccttctccatcatccccttcccttccccctatttgtcttgcatgggaccccactggggccagatttccagttgtcaatgaagaagtgaaaatgtttggcagagcacttaccgtcttggatttcagagcattttgcacatacatcctgttaagcctttcctacgttagaaggtgaattaggaaactgggttcatactgacaccttttgtctgctctcaggcacagaataggttcgtgttttggccccagcgaagagcaagcatctcaaagcttccaatgacaagggtcattgctcccaggagggagggtttccctgccatgcctgagctggaaccagctcatcttcagatatatctcattcagcgttgcaaatcagaaccacttgggctttgtttggcttcaggtgtttttacttcaacaactgaacgcagaaatgaattaaagagaagcaaagccaacccatcaagggcagtatcaagttcaaccatacaaaattgccgttttttgtaggccaaatttatacagtccaacttcatacatacaagttcaccaacagctaaagcagtggttctcagtttgactacacataagatacactggggagctttcaaaacaaataaaacaaaacaaaacaaaaaccacgtccaggccataccccagaccaattaaattgaaatttctagggttggaactcaagcaacaagatttttaacactccccaggaggtttcaagaggcagtcaaggctgagaatttctaaaacaaattaaaatatgtgggttttactaaatcatcagtcatccctcctcatgggccccagtcatttaacagactcttaccaggggctgaccatgagccaggcattgatgagatcctgggacagcagggagccccgttcccttaactcgtagccactctgcttcctttccatccgtgcccatcgctctgcacagctgtacctggggttatacctccgagtgacagtgcccatcttcaggtgcccttggggctgggtggttttcccaggtgggctcacctgcagacccctcttagctctttgcaactacctagaggagagcactttttctggggtccccacctggaaaaacagttttctctgtcctctagggccacgtttctcgacaccacctggaaaaacagttttctctgtcctctagggtcacgtttctcaagatatggtccagggaccacctgcttctaaacaacaaagggatgtttgtttcaatgcaggtcctgggcccaccctagaccagttcactctttgctggtggatcatgggagtcaacattttaaacaagagcctctccctaagatgtctgctatgcgcccagagtttgagaaccagccaagggactcaacctggctgcctgggcacagggtcagtgacctcccttttctcacatctcttagcccaggctggccacccccatcactgaccagggaccacatggagcaggctggtctccctggcagcactggccccgtccctttggatttccgtgtctcaggtttgctctgactctcacatcttgtgagatgttggagctctgaaatacctcaaacctcccctcagcctaagggacaggtctgattacatgcacagttgacccttgaatgacatgatttgaactgtgcaggtccacttctacgtggatttccttctgtctctgccacccccgagacagcaacaccaacccctgctcttcctccttctcagcccacaaaacccgaagacaattatgatgaagacctttatgatgccccacttccacttaatcaatagtaaatgtatcttctctttctcatgattgtattaataacgttttcttttcaatagtttatttatcgtaagaatacaggatataatacatgtaacatacgatgtgtgttaatcaactgtttgtgttattggcagggcttcgggtcaacagtaggctattagaagttaagttttgggggagtcaaaagctgtgctggggttttccactgcatgggggtcagcactcctaacctctgcattatccaagggccaactatatcatctatctatccattcatccacccgtctgtttctctcctcctcctcctgctcctcttctctctctcctcgcccctctctctctcatacacacacacacacacacacacacacacacatcccacaccccctgtgcaccaggtactgtactaagcacttgagatatagaaatgaacaacacaaacatctctgctcttagggagcctctatcccagtgaggacagagagacaatgttttctggggaagtggtaacttcaaggacacagaattgttaggaagatattctcccaggaataaaatataatattttaatggctttgtcattccctctttaacatctttccccttcctctacaactgaagaataaggggcagaggattcctgcttcacgtggaagaagtctgagttctacctctgcctgttaaagaggatatgcactggggcagttgctgaaataggtgtggcttgttaattcttgagacaaaaccagaatgaatgagaggtcttgctggctagttcagtatcaggtgaggggtggaaatgagctagaagggtgaaaataccatgttattttaatcacagtgatggttcacgtcaggctccatagacccagctggaatcccagaggctcatttcctccatccaggtctattccacccaggtctattccatccaggtccattccatcgagatccactccatccagatccactccatccaggtcctctccattcgggtccactccatccaggtccactgtatccaggtccactccatccaggtccactgtatccaggtccactccatccaagtgaattccatccaggtccactccatccaagtgaacttcatccaggtgcgctccatccaggtgcactccatccggattcactccatccagatccactctatctgggtccactccatccgagtccactccatccaggtccaatccatccagatccacttcatccaagtccactccatccagatccactccatccaggtccactccatccaggtgcactccattcaggcccactccatccaggtccactccatccgggtccactccatctgggtccgctccatctaggtccactgtatccaggtccactccatccaggtgaactccatccagagccacttcatccagatccactccatttgggtccactccatctgggtccactccatccgggtccactccatccaggtccactctatctgggtccactctatccaggtccactctatctaagtcccagcataggcatactcaaactgagggatgtttgcttaaaagaaaaaacctattgacaaagatgtggactggtttagagaaaccacaaaagacagtgcagaagcctggggaccagcaagagcatagtgctgttactaccctgatacagtttggatgtttgtttcctccaaatctcatgttgaaatgtgatccccaatgttggaggtggagtctactgggagttatttgggtcatgggggtgatccctcacgagtagcttggcactgtctttacagtggtaaagtgagttctcactctatgagttcacaagagatctagttgtttaaaacagtgtggcacctcctccccctctctcttgctccctctctcgccatgagacagaccagctccccttcaccttccaccatgattgcaatcttcctgagcccctcgccagaagcagatgccagcattgtttcctctacagcctgcagaactatgagccacataaacctttttctttataaatgatccagcctcaggtatttctttgtagcagggcaaatggactagtacatacccctttcttggaggggcaaagacaggaagtggttacccccaatcaaagagggcagcagaacagcaagggctatctgaaagaggctgtgtcatctgctggcttgacccagccaactttgagcaactcaacagaaaaggagctgggaaaataaatatctggagctctctcccttatccatcctctgctccctctcactgtgctggtgcctcccactggaagccagagtggagggaggttgtgatacaacctacgtgggtcaggcccacctttcagggtttagtgccaaaggcaggaggatagatggaaatcactggcatgaccatttatcatagcatatccagaggaccatattcccagggaaagggttttgaaagcccaggccttcatgaactcaaacaccctcccctccatcagctatacaactaagccccttgtagctacagagaacttgcccccttcttatcctttctgtgggtgatccagagtaatatctggagagagaaagctgctaaattgcatgaggttcttccaagtcattcattcagatgacccctttcttcccattctgctgttttgcctgtagtgctagccatctgtgggatgtgcatgcatgcaagtgtatctttggtccatagtgcttggatgacagccacagatcttactaactggctcttctggagatgatgggctccagcatgtggtcaaagctgctgctggtgctggtggccactgagccccaggaaatgaagaggaggtttctccctcatgcactttcctccttgcaggggtaagcactgctcagtgtcacgtgcagctgaggcagaattgttggaaagatactcctaacaattgtttccctgctccccccaccccccacccccagacgtacagggatggcctcagcctgtctgacactacagatgttggagttcccaattttgtgtgtgggaggttagggtgtgtgaagggaagctagaggtttgatgaacagagaaccccgagaatggaataattagggaacatttcccaagacccaaaacaaaactgtttccactctgatggcagagtctaggatagcatttttagaggccccttgctgctttttaaatcctgaaaaggtagcatgatgtcattggtgcctcagtttgcatgcatttattaggtcccctgtgtctcagacaggagcagcgcttatagcatggaagcagggggccccagacctgggaggagacagggataggtgaaggctgttaagatgggcctcggctattgcagactcttacccaagcccagcatctgtttctaaaatcctaaatggaaactcaccagacagcccaggagcccctgggggcttctctagaggaagtgtgagttttcctgtctgctcgggcagggtgagaacccctgcaccctctttctccttcatctcatcttcatccagggaggtcccggacttagctaggaaaatggtaatccagagacaatctttgttggctaaagtgctcctggaactaaaagtgaggattcaacatgtgtgagaagagacagccccaccacgctcatgatgtgtagaagcaccttgcttgtgagctagacttgcactggccaactggtggggcaggagagaggcaacgcacagaaaccatgcttccataaggaattctgcttgtattgtacaggccaggtttgcattttccagaaaggccagggtagaggcttactaatcacccaagactgtgaaatcaggcagaagaaacagcaagggctgcttttctgggggtgaaaagaaaacaagctgccatacaagctgggtggggtgagagcctgggaggggcaggcaaccagacccgtcatcctcaggccccagggaggactctgtccactggcgggggctggacctccatcctgttcagcatgaccagactagccatcttctgatcttcttcaggcagcccccaaatcactgcccaaccctgcaggaggccctgccacatagcctttgccagagacagtcaccccaatgtgttcttctgggccctccttgcctcaaaggccacacaaggcgtgttcctcacagcctgcactttgttgtttaggaggtcattcttctgagtaacgaagggaaagattttagttcccaccatctccctcagtagatattcccctacatggccctgaagtgtggctaccatgactcactgcacctgtaagtacagaacatgaccctgaggttgggaggccccagctgtacccacctctttactgaaaaatcaccttggagcttcttgccatgagatgctgctggtgtgttgaggaagcatagactaactacacagggttctccctactgacagagaacagttcatgtatgtttgttaatgagataagatgatcctgggtctagggtcttacaattttacccttaaaaaaatttcaaacatttatttcagccttaccaaaaggaatctagagaatgcattcctatttggttgtctggagcagggattttcaacgttggcacattgacattctggatttgatcattctttggagtggggctgttctgtgccttgtaagatgttgagctgcatccctggcctctacctactagatgccagtagcacccactacacccagccactcatgacaaacaaaaacgtctccagacattgtcaaatgtccccggggcggtggaggtggggaaccacccatggttgagaaccattgctgttagagcaattttattcaaacaggaaatatgtatcaaatacccgtgtgataattcaatatttaaacatcttacctgaaccaggaactggaggggtaaaagtgtgactaagacattatccctgttctttgtgagcttgcaatgtgggactgggaatgtcccgcaaatgactggatagaagacaaaaagtaggtgcctaaaagcggtccttactgagcctcactctttttttttttttttgagatggagtctcgctctgtcgcccaggctggactgcagtggcgcaatctcggctcactgcaagctccgcctcccgggttcatgccattctcctgcctcggcctcctgagtagctgagactacaggagcccaccaccgcacccggctaattttttgtattttcagtacagacgggatttcaccgtgttagcaaagatggtcttgatctcctgacctcgtgatccgccttcctcggcctcccaaagtgctgggattacaggcgtgagccaccgcgcccagccgagcctcactcttgattgcgaatgaagtgtctttcccagaaaggccccagcagactcctcctatttctcattggccagcaaggtgtcacatgctcacttcaagaccaatcactaatcaaaaggaaggtgattgcaagataggcttggccaatcatgactcattctctagggtgcagtgtttttgtatgctcacccacttacctgcaaagtccattttttagttttttatttttttgcaggaaattaaatggaataactgctgatgattcagctaatggtgtctgccacaccatgtcccaagcttaggtcttcctgaccctctttcatccatttcataacacccataaaatatactcttctctttgcagtcacagaaactgccttttttgggggtggggagttctttctatgagaaagccaagttgaggctgcttttgataatgtcatagtaaagtacattgtgtcaagaacagactgataaagggacgagtggtttctgcctcagcatgtgaacagttcattatggttgccgagtcgattcatgctttgaccaaaagtgtttgccaaagcccagaggccaacatcagcattattaataaattggctgttattaataacagccaggccacacaaagaaaccgctggttatgcttcaagtgcttgtgatcaaccactgtgggcgcttgcattgatatagagctgttgagtgacggtgccttgtctggtcagttgtgtgttaggttgttctgcccgtggctgatgtctgtgcaggctgatatcatggcagccaccatttattgtgtatatactatttgtccccttacgtgcattacttcatttaacactcacaatagtcctgggaagcaggtattgccatcaccgacagacacacaaggaagttgactcagatagagacagtaggttcctaatgtcacccagctagtactgggcaagaccaacaaccaggttaccccatgcttgtctgtgcagtgtggcaggccccccaccaggttacttcagggtgtatgtccactgcctgaactctgaaggccagttgatgagccaaagccatcatgcccagccaaacagcagacgtccctgataacccaaacatcttgtagtgtatctgagaacccatcaaggaaaacagtcccatcacacacacagcgggcaaagagccagaaaattagcttaaggatgggaggcagtgcagatctctaaagctattctgctgccatccaggagagcctcacatgtaagttctaataaactaatctactcactaagaatgacttgtgtctgagtcattctgtgttcttttggctccctcctagtttggggaaggtttttctatatgattctgggtttttctgcatatcagatgctaaatgggcttgggaagataaaggaggggccctctgttaggttaaggaatagagaaaagaaagtgagcacagatgtaagatgctgaaggctgttacatcaaccttggagggcggaggaccagcattctctctcatcttctccagggtccacatgacactcaagaattgctggacccctttgggctacccatgcctgcccttttgcagatgttcccttaacatcacctgatgatgcctttcttttccaccctccctccccaaacaattgacacccccccattttgaaccttcacaatggaatatccatcagcataggtccttacttcacaggctggttctatctgcagcgttctccaccacaccttcacgtgagcatgatctcaccttccttcaaataccagctcaagtgccactacctccatgaagtccacctgggtcctctgtatgcttctagtaatttcaaggggtgcccttttgttgcttaatttgtcttgcattagagcttgctgtggggcatctgactctcaacccaattacgagtccttcaagggcagggacttcagcatccctccctagtacctaacagggtatcttgcaagatacataagtttatttaattggatgaaagtggataattcagaattgattgcttgacgtgatcaagcttcagcaacagccttcataaagaagctaaatgtgtccagctcgcattttgagtgtctgcactttactctgggctttttactggatctgtcctgcaaatttagtctcagctcagagaagctgaatgcatactgaaataactcagcaaaatgtccctgaccctctgacatgtgatgcttcatcactgaagtattcctggtcaaatcacgctcttatcaaagaccatttctcatgtgccttcccattctccccctacacatataccccaaagacacaggagagtttaaatcttattttataaagaaagcatcagaaaagattctctgtggcagaagatattagtggcttgagaacaattcatgtctagctggaatgggagtgattgaagtgtttttgtgcatgcagtagattaatgtgacataaaatgtcgtctgagaattcagctagacctagtgggccccaggggctagagttggcttctattgcaatgaatctcagagctttaggatggactatagtttggaatacaaggaagtgtctgaatatgaggacaatttccctctcttcacatttgcctggacaccaatccaattctgagatccaatcatccttcatgtctttgcttactgggagcctggcctgagttaccagctggggtttccaaagtgatgtgacaccacagccctaagatgctcccagtctaggggtggtgagtagcagagcgcacaatagcagcaccaagggcagcttgggaaggggctttcgcacccgtcttcacccttcccccacctttctttgatatggaccaccaacattatctccatcatagtgaatcaatggcttcaagacctgcttccaatgagatgttgcccccaagactttcctctatacaaattctgggcctgtcactgggcaacaggagtgggaaagtgaccagacctccccggtgtctggttggagttcgaggcccacaaggcaaggactctggagtaagggagatgcagccagttgggtttagaggaaaggctttgctctcctagtgactagggcagctggaagacagagtgttgggaggtaggttggagaaggtagtcatagcctcccttgaaaagaaacaggaaacttgccaaattgatggagagaacaaaccacccgacagtgcacaaactgcatctggggctcctggttaagacatcctggagcagagaggagcaggggcaaaagggaaaaatccccaagcccacacaggtgcacaagtccatgaccaatgtccttaagctgaaccatcctcattttaatgctaaaaacacacccctgggtagagatttcagacgctaatgagacatgggatgtatgtgctagcgtgtacagcaatagtgcatgggcatccaggagacctcccatggcatgcttaacaacaatgcccattcccaccctttatgaataatcatgtaagactcccgtaaagggagcttccccagtgtcggtgggtgctgtctcattatctcgagcagcccactctgaacctgctatgagagtgtacttttcgctttgcaataaactacttacttttgcttttgactcactctcaaaatctcttaagcagccaagtcaagaacctgaaccaaccaactgacaacatcaggagaaagggttgatgtcggggggaggttgggaactgaaatagagcagtccaagcctgagcatgaggggctgtgtgcccggagaaaatgaagagcagggctcgggcacgtaatgaaccctgtgtcaagtgcctgggcagaaggcccaacccttgctcaccagctctgccccaaacacctggtccaagccaccgccgtcctcttcctgggctgttctcccttcttccactttgtcccgccattagccagagtgaccccttgggagcatgaaactggcactgccctgcagcttcccaccttagcagggaggaagccaaggccctgccctgtcaccttcaccaaagcccctgctccaatgcacagtgcctcctccagactttatgcctgtccatagcactcagcttcatctccacttcttttttttttttaatttttattttactttaagttctgggatacatgtgcagaatgtacaggtttgttacataggtatacatgtgccatggtggtttgctgcatccatctactcgtcatctaggttttaagccctacatgcattaggtatttgtcctaatgctgtccctccactttccccccatgccctggcaggccccggtgtatgatgttcccctccccatgtccatgtgttctcattgttcaactcccacttatgagtgagaatatgctgtgtttggttttctgttactgtgttaatttactgagaatgatggcttccagcttcatccatgtgcctgcaaacggacatgagtgtgttcttttttatggctgcatatggtgtatatgtgccacattttctttatccagtctatcactgatgggcatttgggttggttccaagtatttgcaatattgtaaattgtgctgcaataaacatacgtgtgcatgtgtctttatagtagaatgacttataatcctttgggaatatacccagtaatgggattgctgggtcaaatggtatttctggttctagatccttgaggaatcgccacactgtcttctacaatggttgaactaatttacactcccaccaacagtgtaaaagcgttcctatatctccacagcctcaccagcatctgttttttcctgactttttattaatctccattctaactgacatgagatggtatctcattttggttttgatttgcatttctctaatgaccaatgatgaggtttttttcatgtttgttggctgcataaatgtcttcttttgcccactttttgatggggttgttttttttcttatacatttgttaggttccttgtagattctgcacattagatctttgccagatgggtagcttgcaaaaattttatcccgttctgtaggatgcctcttcatgctgatgacagtttattttgctgtgcagaagctctttagtttgattagatcccatttgtcaattttgacttttgttgcaattgcttttggtgttttagtcatgaagtctttgcccatgcctatgtcctgaatggtattgcccaggttttcttctagggtttttatggttttgggttttacatttaagtctttagtcttaatcttgagttaatttttgtataaggtgtaaggaaggggtccagtttctgttttctgcatatggctatccagttttcccagcaccatttattaaatagggaatcctttccccatttcttgtttttgtcaggtttgtcgaagatcagatggttgtagatgtgtggtgttatttctgaggtctctgttctgttccattggtctatacatctgttttggtaccagtaacatgctgttttggttactgtagccttgtagtatagtttgaagtcaggtaacatgatgcctccagctttgttctttttgcttaggattgtcttggctataagagctctcttttggttccatatgaaattttaagtagttttttctaattctgcaaagaaagtcactggtagcttgatgggaatagcattgaatctataacttactttgggtagtatggctattttcatgatattgattcttcctatccatgagcatggaatgtttttccatttgtttgtgtcctctcttatttccttgagcagtggttttgtagttctccatgaagaagtccttcgcatcccttgtaagttgtattcctaggaattttattctctttgtagcaattgtgaatgggagttcactcatgattttgttctctgcttctgtattgttggtgtataggaatgcttgtgatttttacacattaattttgtatcctgagactttgctgaagttgcttatcagcttgaggagttttggggctgagaagatggggtattctaaatgtacagtcatgtcatctgcaaacagagacaatttgacttcctctcttcctatctgaatacgctttatttctttctcttgcctgactgccctggccagaacttccaatactatgttgaataggactggtgagagagggcatccttgtcttgtgccagttttcaaaggtaaagggatcaaagcaacaagaagagctaactatcgtaaatatatatgcacccaatacaggagcacccagattcataaaacaagttcttagagaactacaaagacttatactcccacacaataatagtgggagactttaacataccactgtcaatattaaacagatcaatgagacagaaaattaacaaggatattcaggacttgaacttagctagggaccaagtggacttaatagacatctacagaattctccaccccaaatcaacagaatatacattcttctcagggccacatagcacatattctaaaatcaaccacataattggaagtaaaacactccttagcaaatgcaaaagaacagaaatcataacaaacagtctctcagaccacagtgcaatcaaattataactcaggattaagaaactcactcaaaactgcacaactacatggaaattcaacaacctgctcttgaatgactactgggtaaataacaaaattagggaaaaaataaagaagttctttgaaaccaatgagaacaaagagacaacatactagaatctctgggacacagctaaaacggtgtaaagagggaaattcatagcactaaatgcccacatgagaaagtggaaaagatccagaatccacaccttaacatcacaattaaaagaactagagaagcaagagtgaacaaattcaaaagctagcagaagacaagaaataactaagatcagagcagaactgaaggagatagagatgtgaaaaacccttcaaaaaatcaccaaatccaggagctgttttttgaaaaaattaccaaaatagatggaccactagctagactaataaagaagaaaagagagaagaatcaaatagacacaataaaaaatgataaaggggatatcaccactgatcccatagaaatacaaactaacctcagagaatactaaacacctctatcccaataaactagaaaatctagaagaaatggataaattcctggacacatacaccctcccaagactaaaccaggaagaagtcaaatccctgaatagactaataagttctgaaattgaggcagtaattaacagcctaccaaccaaaaaaagcccaggaccagatggattcacagccaaattctgccagaggtacaaagaggagctggtaccattccttctggaactattccaaacaatagaaaaagagggactcctccttaactcattttatgaggccagcatcatcctgataccaaaacctggcagagacacaacaaaaaaagaaaatttgagaccaatatccctaatgaacatcaatgccaccatcctcaataaatactggcaaaccaaatccaggagcacatcaaaaagcttatccaccacgatcaagtcggcttcatccctgggatgcaaggctggttctatgtatgcaagtcaataaatgtaatccatcacataaacagaaccaatgacaaaaaccacatgattatctcaatagatgcagaaaagccttctataatattcagcatcccttcatgctaaatattctcaataagaagtattgatggaacatatctcaataagagctatttatgacacacccatggccaatatcatactgaatgggtatgtgtgcttcttttagtgatgttttgctcctccactcaaccccacaactgagacatccactccatgggagcagagccctctctgctttgttcactgccgtattctcagctcccagagcaaagcctggcttcaaggagtgctaggtgagtgtttatgtactgaatgagagaaagaatgaaggagcaacgaatggtttaattcgtcctctgcgatctcccaaacaactgcgagccacagctgagatgctggacaggcaaaaaaagtgttgggaagtctgggatcccaggaatatagacttcgagggaaaaaagctgatcaccttgatgacagtggccaagagacatgcaagaggaccagggcgggcagaagggggtgggtggggcgactgtttgagggctgcccggggaaacccccttcacacaggcttacactaggctgagagtcccccagcccatggtgcccggctgggcagagctggtactgaagcccattccaaccagcagatggtattccgtagcccacctgcaaaccagcctcttggtggcttcgagaaaattagagtggtcttgctgagggagtcttccctgattcacgctctgtggattggcctggctgctatgtcctgccagggcagaaagagaggtttgacatgaagggctttgttaagacaagtcaatgacctctttaggtggggctctgtctccagcagggaagcgaggtgtgtgtgagtgaatgcgtgtgagcatgacagtgtgcacatatgtaacagtgtgtgtgtttgagtgtgtatgcgcatgtgagagttgtgtgagcatgacagtgcacgtgtttgtgtgtgtccatgaatgtgtgtataagtatatatatatgtgtcttcatatgtgtgaaaatgtgcaagagtataagtgtgggtaagttctgagagtgttgagtgaattcacacgtgtgtaagagtgtacgtgtgtgagcacatacatgtgtgagtgtgcacgtatgtgtgtgcgcatacacatgtgtacacacgagtgtgtgagtgtacgtgtgtgagcatgcatatgtgtgtaagtatacacatatgagtgttgactacacatgtgtgtacatatgtgagtgtgtgagcatgtacacatgagtgtaagcatacaaatgtgtgtgactacatgtgagcatgttagtgtacttatgtgagtgtacacgtgtgtgagcatacacgtgtatgtctgagtgtatgcatgtgagtgtgtgtacacatctgagtgtgagcatacaaatgtgtgtgactgtacatgtgagtgtgtaggtgtacacgtgtgcagtgtacacgtgtgcaatgtacacgtgagtgtcagcatacatatatgagagtacatgagtgtgtgagcatagacgtgtgtgagcatacacatgtcagtgtgtgtatgcgtgtgtacacgtgtgtgaatgtacacagctgtgagtgtaaacgtgtgtgagcatacacatgtgagtatgtgtacatacgagtgtgagcgtgtgaacgcacacgtgtgtgtacgtgtgtacatatgcgtgtgagtgtgtgtacaatgagtgtgtgagtgtatgcatgtgtgtgagcgcacacgtaactgtacgtgtttgagtgtacatatgtgagtgtgtgagcatgtacacatgagtgtgtgtgcacgtggagcagtgcagcggagcaggcaggggcctggctcccctccccttgacagacttgtccggatttcattccttgcaggactctcctgaggatggaggcccttgtcaccgggcatcttgaaaggacatcctgccattgttcacaggactcaactacagactgctcttccagatcttgaaataagtaccccctggcctggctcaggagcctgctaggacctgcacaagatggtgtgtggacacagcccaaggcttcccttccacgcggtgggaggccgaggagtgagaaagcggaattccgctgtgcaggggagctgaccgatgcaccccggggggacgccggccaagtgaatggggtcactccaaggccagggactctccacatcttccatggtgtgacctggatccccacacatgtggtgtcaatcaaaacattgctctagcccggggtgttactcccttcctggcccctgcgctttgtgtgcttgggccgcatgccccgcctccccactccacgaagtgtgagacagcaagacatgaacttgcttgatacctggtccccctgacacgcagctggagcacgcagcatccccacgtgtccagagactgcg

SEQ ID NO: 272 - DNA, 412480 bp, Homo sapiens
gggaggaggaagcggctggccgctgaggggcggcggggcccggagcgggggacgcgcagggcccggcggtgggcgggcgggtcggcgctgccccgtgggctcgctggggagccacggcggagacccccgccctcaactgaggtaaggaccgcgcggcgcggagacggggaggcggggaggccagggagggggtgcggaggcaggcgggagggcgggactggggtgcgccgggagggggcttggcggcggctctttatggcgaggagggggtggtggcgccgcgccgggagcagtaagtgagctgcaccgccaacaagatctctcacacacagacacacacacgcacacgcacacacgggcgcgcacacacacgcgcgtacacactgggtctccaggcagcggccgtcgccgcatccccggcagcagctccaggcaaagtgacaggtaggaaaaggcatttcgggtcccgcccgaggatgctcccgcccgccttggccctcagggcttgtttgctttccgcgggtgcgtcccggacgcgcgcgcgcgcgcacccggatgcccagcggggaccccgtgcaggtgccgggtgccaggcgccctgtgcgcgcgggaggcaggggacccagacgccatcccccttcccctgcagtcatcgcctgctgggtttcctcagactctctccagacgttcaccctcttctgggctagaaatagctcggctcgacgtgtatatgattattttggttggaaatagttggcaccgtgcaacgcatgtaaatgtgtatgcgtgtggatcttcttgcctcttctggggaaatcatagaaatgattgaccgtttccacttaaaacaacactgacaggcttagcactcattgggggcagggttcgggcctcctaaaagcctgttagtgaaggaaatccttattttcagaattttaaagttgcttttgctttaaccaattagactctgtatagtacaatacttctgagtgtagacttcgtatatggtactgaatcgaagtatggaaatatggaattctctaatttccaagtgtgtttaagtgcaactttatctagaatcataaaactagcattttcctagagagaaatacaactgcccactatagtttccataaatatggatatatctgaaagatgaccctactcttccaactttttttcctcttaacttctgtagtgattctagctattgttctaaaacatgtatttgaaatttaattttggccagaatattcaggaaaggtgtttttttttccatatacgtaatacttagtggtctatatatttaagttataggtatgtggagatagctgtttaataattctttttgtctggaaataacgttattcaaacataggcagctatgtatcattttaaaatgatattgaatttccccttaaagagaaatcagatttataatgtaaacatgaccaggaaaagcaactggtgactttacctggggaggctccaaggaggttaagaaagtatctgaacaactgtgtttttcagaatagaaaaattgtgtgtgtgttgcgggggaaggtaaaattttaactttattcttttattgttttcaagacggctgttttcagaaatgtgtggttgaactgagaccctcatattttatactcttcaaatttgagtggcctcagttatagaatcatacagaagatcaaaagtctagctcagcaggggcatgtggtgtaatccctcactatctgtgttatgtaatccagaatgctgtttttcataggacagtcttgcatgatccttagctggtgtattgatctattatatcatcttccttttgaactgtagtagtttaataaatgattgccatctttggagagcacctgttttcataaaaaatcactttttgaaatggcaaaacatttttattggcacttttatgaacgtaagacttgctgccagacgagtaaccttttgaatgtgacgtattataacatatctaaaggtaccatgtattagcttatggactacacttccttccaactatattattactcaacagttggaacttagttttgatggtattactacccagctctgaattaatcgctgttgaaaatgctgttctacaagtaactgtcaaaacagaatttctaactccatttgatcactgggtgcacatttaaatctgtcggaataactctacctttattttgcaaatgcatacccacgcagaaagctttgttctaaaatactctattggaagttttatatttatatgcctgaaaatgtgagtgatgttaaactgcttacatgtcctggaatcgtgaggcggtgtgtttttgccttatgagataaagaaatatggtagttgaaaaagtgttacaggttaccaaaaaccttttgcaggaaaagattttaaaaatttgtatcacctctgaaatatttcaaccacagcagagtccattcagtgcccgtagcacagctagtttgcctttcccaagattacacacaactgtctttagattaatgtatactgctgactttggcaacatgggacagttatatttggcaatttcagtaaacatggtattttcctaagataccactaacttcattttggggtttgatttattaagaattgaaatgtttgcctggtattcatctttacctcaccctctaagtaaaattgaggtaaaagtgagcttcagggctgctgtgctgttttccttgtgatcacattagcatgctaatttgtgaaaggatgtaacaatataagtgaaattagcttctgagtttagtgtctgaattttcatccccagtttttcagatgtagctggaaaactcaaataacagaattaatgaaaaaattttgcagattattaaaaaaaattagtaattagctgagtttgattttttattttgaaatcttgagagtaaattttatcttttcggattagagcacttaggtaatgtaagaaagattttggatttctcatgctctccacacttaatagtaaactatttttgaggaagtataaattttctttgaaacttaaaattatttagcaggctgtgactaaatttttgtttgtgatcacttataaagtaagggtgaaacagcatgttgattagcaccgccgacccaggtcttttaataaactgtctatctaccacagttgagtccctgtaaaaccaagaacttctgtatttgatatgcaaaattaggtcaaggactaatggagatgctttaatgatcacagttggtattttatgtccagattgaagtttttaaaatagttgcttttcacctcataatatatgaatgtgtaggccatattagtgtctgtcaaggagacttatctgcctgttgggaaataaatacagcttttcatcgctggtgggaggcagcagtgactttctgtggttttgctgttggttttcagatgtgaactgtgtttgcaaggacactgcttaattctcagtgctgtccattccacattttcctatttccctctcatattgggaaaatgaataaacttgtgtagctctttcttctattccttagtatttgtttgtttaatagttttgcttttgataaagcctcaccctttaaagtagaaatactttctcaaattgtaatattatttatctagttatgccttagaatgatataaaggttttacatgttcctaggctgtgattctttagctaaccaagtataaaaatgagtttacttccttgccagtggaggcagacctgggtgattatgcattactgagtggatgagtgtgatgtttacattgtcttggttggaattaagcttgctttgaaaatatcaccctggaataacttttatttgcaaggcccacttcactcctttgcagcaaccactcccaaaccccattttctgggtggaagggtagaaagagtctgggtggaagctcacgactttggatgcttttttatgctgaaggcgtaacccaagtttctagaggagatgaaagtaataatgctgtacctttcaaatctcagctaggagatccttatgttccagggaatgaatgaccagcagagtgtttattttccctgcatgcacttcgtctacttttcctttcctttatcaaataaaaatagttgaaatggacataaatccaaggtttttctctgaacacctctcttactcactacttataaaaccttcaatgagaatgtcacacaccatgtgaccataagatagtgttatcttctcccctttcctgggattctccttcaaagctcaaaggatcttttggtatgcctagggctgggaaattccacctctagctacggaaatacccttgggccaggcaaatcatggctttaagatacattgcccttcttgtcctcccgaacaattaaagcatgtctttggctcccagacatgagtgaattgaagtagccatttccttagaaacaggaagaaaaaagcaacttgaagtaattaattgtaagcagctcatccagagatcagagaccacagaccacagacccctgattttacatttgacatctccctttcttctctagaacaggagttcttcattttagggccaaggatgcagtttggtgggtccacgaatgtggctggcaaatgaattacatctttatattcacttacttccaagtgacaattggggcaggtgttagggctactactagatcttggcatttagtgggttgaagagaaacacatgtattacttcacatatccctttaaagagttattttgataattatatttcaatgagattgatttccattgtacttttaggtatttaattttatatatttaaacatattatgctgggccaggcatgctggctcacacctctaatgccagcactttggaaggctgaggtaggaggattacttgaggccaggagtttgagaccagcctaggtaacacagtaagatcaatttatgcaaaaaataccaataaaaaaattagctgagtgtggtgcacatgcctgtaatcctagctacttggaaggctgaggcaggaggatcgctcaagcccaagagttcaaggttatagtaagctgagatcgcatcagtgcactctagcctgggtgacagagtgacagtctattaaaaaataataataaaatgaaaatatcctgctgaaaagggtctttaagatttaccatattgcgaagggcattcatgacccacacaaggcgaagaccatgtgctcgagaaatgcttcctcccagaggcagctggctgggtgggtgttttcactgtgggtttgcattgagcagtggttgctgagatcttcaggcgttggaatcaggcactgaattcctgacaaatgccctgttttagcttgaatgctgacagatgccctcttttagctgtgtgaccctgggcattcactctgagcctcagttgccctatctgtaaaatgaggagaataaccctatggggcaaaagtgcttggtgctgcactgtgaatgatacagggtactgttactgctgctactacaggtgctcaaaggatcccaggatctttgggtgtgcccaggtttgggaaattccacctgtagctacggaaacacccttgggccaggaaaatcattactttaagatacattgcctttcttatgctcctgaacaattaaaagcatgtttaacaagtgctactgccccttctcctaatggtactactagtattatggctctcatcttgttctctttcataggggtagatggcattgaccttatccatacaaagcagcctgagaaaattcctataaaatttacaagggacacttactttgccactctgcaagtacagaaagtttcagtcaccccacaggaccaccatgaagtaccagatcttcctttggacttgccaagcccagtgactgcatttggacagagggacctaatattaactcagtcctaatagcttcaaaattctgtgactttggtgtttcagaatataattcagtgagccagatgctgtccccagggtatctgtctcccagctaggcttttttttttttttttaaacaaaacaaaacaaaacaaaacaaaacaaaacaaaacaaaacatattaagccatttagacctggagggagaaaggcctccactagaagaattaggggtctctggtgttcaggggcagtcaccatagctcttgtttttccatggagtttctcggagagtactcaacttctctgctttacatagtattataataacaacaacaaaataaaacaacagacatttgttgagcagttaaaatgtgccactttatttaatacttctgacagcctttttgagtgtgtcctaatagcatctccagtttatacttggggaaactgaggttaggagatgttaaattaatcatcccaggatgttaaagttagaattgagactgaaactcaggtaggctgacatcagaactccaacttctaaccaccgtactgtgtattacctgtcattaagctggtacatgctgcagaaagacttgttaccataacaagttttgtgataattattttaagtgactaggctgagatatgacaaaagcttctggcaatcctgctgtgaatatggaattggaataagaaattgaggataaaacaatgcattcttatctaatcctaggtacttctgtttctgcagttgcatgccagaaatccgagatagggagagtactaaatgctaattcgtggtagcctaaacaaatagttttagttttctggaaggccggtttttacctggtgaagttcctcatggttttaatgagggtgtggtgtactctgattcctctaagggccaagtaagtgaaaggcccaagtgtggctgaccaggtgtcagaggccttagggagtggtgaggcttgcgcccatccaggggcccaattgtgccccttcccatggagcagctaccactcgggtctgacaggtttctgccaggtgggcctagggcccaggattaccagtgcctccacattttcaagagaagcatgaaatccagatttatttggagtcttctcattttaaaatgtttggaaataattaaaatggaaaacaaacctgtcagcccatggtgtggccaaacaaagcatgtttgtggtttgacccaggagctcccatgttgagccttttgttagctgtaagtgcttggaaacaccgtgtactagaacatgtcaatagtttttgttttgccctttaatttttttggctgtaaaatttcttataaaggttgttatggtcatttatttccagtgtacatagatttcagattctgaatttctgcttgtttattctctccctataccctatttttccaagctgttggcaaatacacaaagttgaggggggaagggcatgttttttcctcctgtttcatggtgctcctttaaaataagaacacctggccgggcgcgatggctcacgcctgtaatttcagcactttgggaggccgaggtaggtgggtcacttgaagtcaggagtttgagactagcctggccaacatggcaaaaccccatctctactaaaaatacaaaaattagccgggtgtggtggcaggcgcctgtaattccagctactcgggaggctaaggcaggagaattgctcgaacctcggaggcagaggctgcagtgagccgagatcacataactgcacttcagcctgggtgacagagtgagactctgtctcaaaaaataaataaataaataaaaaataacacccaagtgtacagaaataggtgacttcatttatggagacacagaggttctcttgcctgcctcactgatttgaactctaaccagtcacaagatgtcccccctgctatttggtagtagctgtatttgtcctgaaatatagaatacagatctgttcctgcagaccagtgtttcaagatgcagtccgcttaacagccctcattttccttgttgcttttaaatgagagaccacactggatcaaatgaaaatgcagttccttcgggatgtgtttctctcatatctgccaagatgctattattggacaaatcaccaaagccctctctgggatttcttttaattttttttcattggttttttaaaatgatgtaagtaatacattaatatgttccaattgaagtgataatgcagaaatatggaagcaaaatgcaaagtacccttttccacctacacccattcccagatacagtcattggcaatagtttagaatgcctctttccctccttttttctgtacatttacatgtataagtatatatacatgtcattttcttattacatatactggatcatattgtatacatttttgtctgtgactgacttgcttttgtccacttaactgtatatcatggagagctttccatgtcaatatgttagttatcttgttctttctaacattgcataaaatttgatagtacggatgtactgtactttatttaaccattcttctgtggacactattgcaaactgaaagattcaagatctttgttcgtaggtctttgtgcacatgtgtgagaattttttttgtagctaaatttctagaaatggaactatttggtcaaaagcctatgcacacttcaaattttgacagagcactgatgaattgcctttaaaaaaggtctccatgaaatttgtggaacctctgattatgcagctgaacatagcctctaattgcagcatgtcccacattgttacctcgctttactaattcagtaagatttcacttgtatatggcataccaggaagtgattttagaaacagactatgtccttaaaatcccttgaaaatacagttcttaatcaaaacaaattgatcagttaaggggctaatgtaaaaactcttttaagaaagacatatcttgtagaatcagagagttgaaaatctattttctgatcaatttggtgagctgtgaaactctagacccttcccagcagggacatgtccataagcaccctttaatctgttgttagagaagtgaggtggtccacagccaacacagacagatcagacgttgatactggcctgggaaaattaatttcattgctgaaaaatcctatccaggtgtgtttgtagctttaggttttcaaatactagttatttaagaatctcttttgctttttacttaaagaatgagaagattaggagataatgctatttaatgagttttatttaatggatacttgaatttaatgtccttgactcttatttttttatattttattttatttttgagacagggtcttgctccattgctcaggctagagtgtagtgatgccattatggctcactgcagcctcatcttctgggctcaagcgattttcctgcctcagactctcgagtagttgggaccagaggcgcacactagcacacctggctatttttttctgtttttgtagagacagggtctcgctatgttgtccaggctggtgttgaactcctaggctcaagcagtccccccacctcagccttccaaagtgttgggattacaggtgtgagccactgcgtctggcctggctatgtttttttgaaatgatatgttgataaaggactatataaattagaaactataccttcttttcttttcttctcttttcttttcttcttctcttcttttctttcttttctttctttttttgagatggaatgtcactctgttgcccaggctggagtgcagtggtgcgatctcggctcactgcaacctctgcctccctggttcaagcgattctgggttacaggtgtgtgccaccaagcccggctaatttttgtatttttagtagagatggggtttcaccatgttggccacactagtcttgaactcctgacctcaaatgatctgccctcctcagcctcccaaagtgctgggattacaggtgtgagccaccacgcctggctgctacaccatgttttcttttaaagagatattgggagaaatattgcaggaaatctaggtcactgattgattcctaactgtgttcagaagggactactttgataactgtaattgttattaatgatatgaagtaaattatttgtgaattttaccacattccttgaaagactgagactcagtcagggttagtgagtcttgattagataaatgacagcaaagtgaaatactgtttctgtttcccaaagatggatttagtcctttcatctgtttctccagatactcattttttaagaaaaattctggtttggttggcagtgacattcagattctgattgtatgccttctgcatgtttatttttacaacacactgtgaattgtagaaatatggtgggacagtcatatttccttggcattgaaaccttgcatattcaagaaagtctgtgctaggttttgctcatggaaatgttatagtgtttcacagtttacagacaatttcctttgataatgtctgtgaaagcacagtggagggcaccacctggtcactctttcaacctgtatcattcagggccctgctggggaacagatggcatgtgtacgccaagtcctttgaggagggcttgttaaagggaccttttgcaaggtgtgggcaggtgtagggaatacaatcagggtgaatgctaaagaaagacccagcagtgacggggagttagtcctactctaaggaaggggcaagaaaggctgacaagagctgtatccctttctagagggaccccgtctgcctgtaatatccctccagggagacagaggggaatatatataccttcctcactctctgcctgtcccctaaacgctggctagtgtcttccattagccgaacccagacagaagccagagggcaggagagaggaggaaaagggtggaaaaggtaagtgaatgggtctgggaaggccagtagcagacccccacccatttgccctccagaacagaggtttgcatggttgagtggtcagtccagggtagaaagcttatgatctggttttgtggacaaagaaaataaaactgcatctacagtgattaaattgaaattgaaattgaaattgggaattttctacaataccacatggctggtatcagtaaaatttgtggtgggccttagagtaacattaaaaaaattttttttttagttccctttggaagggattatgctttatgcttcttgggaaatgcgtagaatgggaaatgttatgtatttatctgattaaccaaaaatgtaggcttatagataggacagacagaagggattcataaagtctctcagcatggagttggattcctaagatagatataattcctttgattttaatattttataaaaatattttatttaaaatgtcaggtacctgggggaagagactaggaggaaattaaggttattaacagtaattttccttcaaggaagtcaatttaacagaatcattagcatcactgagtataaatgaacaagctgtatttccccatttgttcagcatggcagcaagactctgaaatttcaggctcatttattctctcattttcttggccctgttgcttgaaaggtgaagtctgctctttggtttgtgtacttgtcctgaatgaacaagcaatggaacttaattagaatcataaaataatactgctataaggtatatcagagttcatttcttcttacctccaaattgtgtgcagtaagaaaccaagatactagtcattagcagctactactttgcaagttctcagagttggtcactctggaaaaatcatatcacctctccatcatgaaggaattgcactagattaattcatttttgcttttacccttatatattcctgaagtccttgattccaagggtttggttgtccattactcactattttcatagattagaggcagagcttcttgagtacctcttcattacttagcccttaaaatggtattctctggaggtctctacattgcttttgactgtgttcactctgtaaactctttctgtataagataactcattcacttctaccatttttataacccccaatttactgaagactcccctatcactgacctcttgtcggagctccagatatatcctgttgtctgctggagatcttgacattgaagtctatggggactttcaaatcaaagtgtacaaaacaggagtcctcaacttcactccaaacttgtgtctccttccggtttctaaatcttcatgaaacaagctatccatctgttgagtctaccccatcaatatccttcatttttgttcacttttctccattcctattgccgctagcctgaatttatgtctgcagaatttcctgtcttgattgttccaagaatttttcattcagtctctctatactgtctctttcttatctgtgcctccattcatgtcttctattggctattcagtgagcatcaggtactttaacagtgagatcttgctctcaggagtttacagtttactggaggagacaaatagacactactttataagtttacatctttgcccgttgactccattctccaaaccagctaaagtaatttgcacaaaacaaatcttattatagcattacctctaagatacttcaacagctccctgttgctatcaggattaatttgttttcctaatttgccaaatgtaagccatccctggcctgacccctgtgatgaagttttaactcctttatttgcatcacctatactaggctgtgttgaaatccaagaacataaagcctgctgcactgtggacactgtggctttgcactatgactttgcactcaatccccttcttcaactggctgactcctacaggcctttagagacttcatacagttgtcatcttcctgtaaagccttccttgatttccactccagtccagattgggtgccctactttagtcctcctgttgaacagtttgcaaattttagccacagcatgactctcttgggaaatggaacaatctggtgcatattagtgactaagttgatgtctcttaaatgaataaataaccaaatgccattattgcaaagcctgcagattgggtaaattaggaaaacaatctgatgattaagcaaaaaaaaaaaaaaagccaaagtttagtaaaccgaagccatctgcagacctattaaagaaaaaagtatttcatgattatttacactggtcattgaaaagtagcagaataatcaatttggaaatatgataagtaatttgaaaattctatatccattatttctggtaacagaaatcctgatattgtaatcagtatactagatccagaggagacatttccctgaagataagttatcatttttttcctgataggcacatactcatattgtttttcctattttatgagttcgattttaatcaagttattcttatttttcttaacagtgtgttataacctggaattagaaaaaaaatttcttatttcaaacttggttggaaatttaggaacaaaataatttatttaatcagattattttattaagtgggactcttagtaatttaaaatgctttgtattcattttcttgtagcattttcttttcaaaatgacctgcaagtacatcagtgccaaacagagaaagcaagaaagccattaattaattgaagggaaatattctgctgaatacaatactgtttttgaaagaacatgttttatagttccaaaaccagaagggagcattttattcgtagtggtttgaatcttgtgaaaagagtgtctttgacagtcttcaccaggcccccctccccaagcttggagcattaataggacttaagaggtgttttcttcacatttggcttctttttgatttcacagatttcttttagctttgtgtcgaaaagtgctaagtatgttaattattagatatatcattattcacatttcagtgcagacaacatttaggaggattatagtttagttattacagcttttcagaaaacacttcatgatagcacttggaaatacagatagagaatatttccttttatttagagactttttggacctgtgaggccctctgagaatcttaagcttggccccattctgtccatttttcatttcctttgaaagagtttcaaagtaactggttaaagtttctccccatctgccataagtagcatagagggatttcttgtgcagctaccaaagggaaatgaggaaatttaaaagtgcagatgatttgggtattaacacatatcctggcagtggctctgccagaatcaggctctcccaaaccattttgttttatgttaatttttattttctcagctacagtattataaacatggcagaccaacaggttttccataaagattgatgatcaggaggaatccactccttaattaagagcagcagatgccttctgaaaaccttctggaaatgttctacttaatattgaaccaaagtgcttccagctttgttggaaaggttaaggcaataattacatggaaggtatgtctcatttgtcaacagggtttttggtctagaatatctcaagagcagttcctgtccatttccttctagaggtgacagcagccttcttattgcagaagggttatggtgcagggaacataagtgcttaccaataactgcttcctatcctcacacaggatacgagacacagggtatgagaccctcagaaaggaagtctctttctctacacacacacacactcatacacacacacacacacaccgcaggtgcttgagccacactgtggaatgggatacataagaaatggagccaattctttgatatttttgtctttactggatggctttgcaatattttaaaaatgttgaaacttccaggattctttaacaccgggcccctaacccattatttattaggcttaggcattgtgccctgggccttcagaatacaatcccatttcattctctcagcaattctgcaggttaggtataattacgaccattcgatactaagaaaactgagtgattacagcacttactgagggtcacatggttcatcagtggtatagacaagtttcaaaataaggttgacctgacctgaatctgaatggctgcatctgtgaccatacaggcacagaggaaaggccatatgaggacacgggagaaggtagcagtcgtcaagccaaagagagaggtctcaggagaaaccatgcttgctggcactggcaccttgatcttgaacttctagcctctggaactgtgacaaaataaatttctgttgtttaagctagtcagtctatggtatttagttatggcagtcctagaaacctaatacagtggagggtttcttttacatgcagatgaaagcagtccttgtgatacagaaacaaagtattacagaccaaaaatatcagaataataattttggcatttgaacacatgttcctaatttcaaaaggtgatttttttcttgagttggtttagtttagagagtatttgctttcactgagctttcataagagttaatttgtttacaggcagagatgagataaatcatgtctttctttagcctgtttctttatctgtttctttttttctacatgaattgcacatacttctttaaggagtcttataattaaaacatgttaaatgagctcaaatctttttccataattaggaacttgaatcattgcctaatttgtaatttgataagtaatgtgtatttgttgaatttttctgctatcaatgtaagtcctggggtaattttctaaaacaaaataaaaatggttttggctctgttttcttaacatattaacagtagtctaggaaatattttaatttctctttagttagttggtgctttctctttgtaatttttttttttgtgtggggaataaattatcataagacattcattaagtgcattgtagtgttttgcttaatttggtgcctgtcaggaaaaaacccagcagcacaatggaggtgctatgaatgagttattttatttattaatttcaatctaaatttatcaccaatggagaaataaaatatttgtagaattgaggttataaaacagcaaacataactgctgaatgatttatattcagtacattctttaatataaagattggatataaagacatcttcaatataaagcatgacattgatttgctttaaataaaaaaagaatatattttcacaaggtcaggagattgagaccatcctggctaacacagtgaaaccccgtctctactgaaaatacaaaaaaattagccgggcgtggtggcgtgcgcctgttgtcccagctgctggggaggctgagacaggagaatggcgtgaacccgggaggtggagcttgcagtgagctgagattgtgccactgcactccagcctgggtgacagagcaagactccatctcaaaaaaaaaaaaaaaagaatatattactttttctttttccaatattattacttgagtgagctttttaaacagtatggtgctattttattagttaggtaatgcatacatttgattaagtgtgatatattttgtttaaaatactattcagaacctgacatagctacagcatagaatggggtcacataataaaggttcttctcctttacatatgtgcgtgaactttcagtgagtcacatgaaatgaccactggtttggtcatttgagtttatttgaatacattagttatgagctatttagttctttcaagcagtcataattcattctcaaattttaaatcagacatgtactgtagctagcacgtagtaggcttttaaatgtgtcctaaaactaatatgtaagatgaggacatgggccacaaactgttattttgctttccttccttatttcatggttttgtatatcttattttggatttgtatgcattctgctgcttctaaaattagtatctaagcaatgcattttttaacattaattatcaagttttgtcttacttttaaattctgccttatataaggcagcataagtgggcattactgccttgctgacacctactttcctggggtgaaatatattgaccttgactgtaaccttgacatttaagatagttgactagactctgaaaagagaaagaccagcgtgattgtaaatcacacctatttgtataacatcctcaattacgtaataaaaataatccagaaaattgccaagatacttgaacatattatacggggattggtcttagaagcacagacttacccatgggaattagttcattttctgaagagtccttcaccaaactgaaagttgagtttacagtcctgagaatgtgatgcctctttggttattataaccacaaaacagtggaatggctgtttcttcctttaagcaaaatgatatgtttaaactctttttttgagggatgatttaaaatgtgttaattatgtggcttcatttggaatataagagatgatataaattaaattatcactgaaatttttaccctgcctgcctcactcactttgaccttaggaccttacaaagagtgagaaaaagccatcatgatgagaaaaagtgatcatctcaaactcgtgtatgtagatgaaaaaggatatatgtttctgtgtgaggatcccatgtagaaatacctttataaagttacttgcaactacagcatcggtatattgggaaggaaatgaacattttttgaagtgtcttgtgaaggtcaggaactcctctagggactctcctttgggaggaagtttagcaaaatggttgtgagcgtgtatgatgtgcattgtggggtcctggctttgctactgagaagccgagtgaccttggtcaagtcattgacctcgtcctccttatcatcattttttatatctatcctgtgagataggtggcagtatcctcattctacagaaaaagaaactgaggcccatttaagtaacttgttcagggccacataactagcaagttgtagcgcctcagctggagtcagaccctgctcaggattctaccctcttctaccccttccatgtggtcttcccctccttccaaggctgtgtttgcctagctaccaagttgacagttttgatcaaataggttggttgctttcatgttgaatgagctcagattaggagcaccgatcatagggaaaaggtttcgaaaaggaaattgggagaagtgacttatagctggccattgccctagctgattatgtgttcttgagcaagtcatttcacatcaccggtttaaatgaagggcttaggcttctagaactatttcttttatatttacccttttatcatcatgaagtgtttctctttgtctctagtaatcctctgtgtggaagtctattttgtcttattaatatagccagttcaacattattttgcttactgtttgcatgatataacttttttcatccttccaacttatttgtgtgtttccgtttaaaatgtgtctctttgtagagagcatatagttgattcttgcttttaaaaaaatctattccgataatctttgccatatagatggaatgtttagtccatttacatttaaagttgttgacataattatattctgtggttaacattttatgaaatatattacatttgcattttgatatttctatatcttctcagttttctttcagatttaactttatggaaaaaagtcacaagacttattttatactatacatagtatactatacataggttgtatacatagtataattggtttgttggatgggccacacttagtgagacataaacagaaaatagctttattctctcctctcctgtactttgaatgattttttttggcagatcctatagcttttcagtcattttacagtattggaacaacctaattttcaaatattagaaaaacatagtacaatgtaaatcaaaacttccattttcccatccagtttgtagcttctccccttttttcattcttaggcttgagcccaggcttagtgatcagcagtagggaagaaaaggaattcctggtttaactctcctctcttcctctcctacacattatctggctcctccagagttgacacgggggacataaaaggggccaaggctattgcacgtagcaggtgctgtttgttttcaaggccagttctttctcatacacaccctgatggattttttggagagcccttgcaggtccattggcatcatgccattatttgctttgagcactgcaatatcagctcctcatattccagtggaagatcactggagtgtctctgtgtccttgtccaggcagcccactcagatggaggcttttcaggatcattcaaacatgacaaccttccatagtattcacaaggtccacaggaaaactctcatcttaacaccatcagaccccgagggcacagcctgcttctacttctactggggctctgttgccttgcagatggcatcagccagccaatctgatgcacaagccatggtttctgcactgaagcaggcatccaggcagggaatagaatatcagcctctgtcattgcagatagcctcaatttattatggcttttcttttcttttcttttttttttttttttttgccttccttatgaggtgttagagagagaaggaaagggatctgttgaattttctttgaagagtttgctgcagtgcagttcttctcatacacagactcttggaggtgatctctggactggcttggccatgtgtagcaagtcctgtggacatatacaaggaactcatcatatcacctttggcattgaaacattagcagaaaattgaaacaatattcccttttctcatcattagaagaatttagagatcactggcttaatagtaagatgcacagataagtgttaaaccttcagctacatttataattcgtgaactgccacactctgtaagctcctaccttcacagtaatgagaaatactaagtaccaaataaatgcttaatgaatcaagtcatggtgattgcaggatattggtctctgggaaaggtaaaggtgaccaatataataagaggaatgaggttgctaatctgtaaaattctttactgatttggttaaacaatgggtcacttaagtggaaaaaaatagaattcaaaactactgttagccttgtcaaactagttggtcaggttggcctatataaaacctgaaactggattgacaggcacttctgctggaaatctctaaacagtacagatcatataggtatattcataaatgtatatatatgtaaatgtgtacttttttgaggaatatatatatacttttgcatatatatgcagacatataaatatgtattttatagactaatataactgtcagagaaatgacataatgatgtcatataatatataaaatataaaaatatactttaagagttggcaaataataaatagcacagataaaggagaatggtttggaacaagaaacaggtaatttcccctaatttttggagcagaaatagatgaatatgaaatgtatatatcagttcattagttagcttatttcaaagtacaaaatagccttaaaagatttaatgtgattttgtaccagaatttataggtgacaatatgataagaagttactttaaagttataaatttaattttgactagttaattatcaatatatttaaaaatatattaacatgtgctttatcctaattaaaaggagattatatctcagtagtgtctaagatttttaaaaataactttggtacttataaaatatgtgattatgtaaaaaatattggaaaataacttaaaagcacaaagaagaagggaagaaggcaaaactacctttaatctaattataataggtggtaaccaatataggccagaatgagaaacaccagattgctttttgtttattgatacattttttccatgagtgacaaaaattggtcttttcatggtagaacttcctttgatctatatttaatcagctcacttaattttctgtttaaaactaataattcctttcatggctagactttgtatgtaggaagtggttctaagattgtgtccaatatcatcagaaatctgcttaatataactcctaaagctttatttgtagactagatatttgtatactatttggagcctttgtcagctgttaggaattattttaagatgtggagaaagaaataaagttagctggtgaataaggaagtattttcacacttgatcctgtttttagttttaatcctggaattgcttatagcagttaatgtggacctcaatatttcattttgtaaatgagcagtgtcagtatgatggtggggttaaatgcaagggagatgcttttgtcctacttttcaaggtatactttaagcaaggtaagcattcgtaaaggagtcctaatttactagaaagcttgaagttttggagcagagattttcaaagaagttgtacgcagagttctttctgagctatggcctgatagtgtctttgtgaaagtatcttcttcccatttcttttgttatgaagcctgttttttaaaatcattggcctttggtgaagattgaacacattgaaaaataactgtataggagaaaaactgtgagtgttatagtgttatttaattgagaatactatttatgtgtgtgtgtgtgtgtgtgtgtctgtgtctgtcatgggaaagtattgaaatgatgcattactgaagaaaaaaggatttgtttatctttccaaagagaatcgagctattatttgggaaaaaactcaacatccttttaaatcatatttttttcaaatgtatgtgtatgggaaatcttaaaataatagataactaactaatagaaagggggagggaaaaaatggaagtgtgctttgtcacccgataactatcccaaaataagtttggcttctaacacatttttagtgtgtttttttttttttttcaaatgggtattagatagcttccgtggtagaagtgaggacttgcagaatactctgtgttactaaaaaattgctggaaaagttaacctgaaatggcagagtaaagaagctcatgtttaagctaatatactccagtaacttttgcatctctgcacgttcatcacagactgtgagcatattgtgtataaataattaccaaatgtttcgggggtggtgattctatttcttctccatgagaatttataaagttgttaaatttggtttctttggagtcatcacagtttatttcactgagatgtttactggataaatattttcacagaagttttcatcaacttcaaagaggtagtagttattcaatgcaaagtattagaagcctattgcaatatacatgcaatttgttttctttcgacagtagacttgtttctctttttggttcaaatgaattcattattttaaactgcttcaatcaattcgatatgttgtattcatagacacagtgggttttatttgtaagcctccccagagaccagggtccccagggtcttggtgccacatgttctgtaaatgtgacaggagagctggggtgtttgtaccatacatgggagagggctgatttctgagagaaactaatgctgttgactcataagtttctttttatcatttctaggtcatacaagtacatggtagctttaaaaaaaaaacatgccataggtatgtagagcctttataagtctcgacaactgtaaaatgagctagagaaagtcactatctgggtcatgtggaaccacatctggtttatgatatgggcatgtagtaattgtgcttgagattacagtggagcctcacctggcttatgtttttggccatagactgaaggttcctttgaatgttccctcagctaatgtaggtatgcagtttataaataatattttcataaagacaaaagtgagaagcagcattgtacagcagaaatgtgagagctgactttcctaggttctgaccttcctaggtttgagtatccagtctgtcttttgctagaaaagtgacctcaggtgagctccaaagctccctctgaacttgtcctcatgggaaaggggagagactagtgcctaactggggagcggtgaagactgcatgaaatactagatgcaaagtgcctaacacctcacctggtttatacaacaatagctacctgttagttgtagttctgttcttttctttctacagacatttgaccattaaatacacaattatttcaacccattattatatttctagaagtgatgcttacagatttttttttctttttgagaactgcatgcttttcataaagtctcttggaaaagtaatctctatgtagttttgcttcttcattcattcagcatttgtcaatacttgttactggcttgcttcctgaggtctaggagtttatgttgtatcaagagagatctacagataatagaagttactgtagaattttaagttccacagaaggtgcatttctgaggccctataaagcagcatttgaatcaggtcagctcttcagccctcgagaggtattttcatgttcttgttttctgttttttagtgatgttccatttctggtgtttaatctaggcatgccactaaatatttacttttctttgtgagacaggttaagactgtcttaacttagaagattcttcatttctttggtcactggaatagcattgctgtcttttttgtcatcattccgttttgcattgttatcattctcttttgcattgttaatatcagaatgtaatggtccttaggaaagcacagtgtggctcggtagagtgatgtgccttgttgtttctgatgcttttttgattctctctgaagcctgttggtgagcctgttgggtgagacatccttagtgttgacaagtgggaattgttgatgaggtttccactgcaatggtgatgtatctgttactgagcagttatagggtgcatcgcagttagttaaaataggagcagcttctcaggatacagaagggggaaaataagttattgctggtgtatatattagaatatttttggctgtgagtgatagaaaacagcagcctaaactaacagaagtttaagagaaatgcacgcttgggaatctaagcattttgggcagatgtggcatctcagcagtgccatcagggaaccaggttccttctgtctttctcaccactccttatcatttagcatttatttgtcttcataggtgtgagatggctctgcaccactcaggagctatttccaggaaatgagggattgggacttgtttacatcatgagaatgaactttctcagagctctctctcttgtatctcattggtcaaaactgtgtcatgtggctatccctagctgccatagtatctgggaaagcaaatcgtttcagcttagtatattggctcgtaacgctataaatgttggctaaacaaatagctatagccaccatacctgggaattttgtttttgtcacatctactagcttagttttagatttcatgatttggtaagtattagatgctacttcattcattcacttatttgacacatatttattaaatgcataaggccttaggatataccattgcaaatttaataaaactagtcctcatattatggctgcatgaatgtaaaatatctaagtatggttgcgagctaatggatgtttctcttagctcatgtagtaaatggctagaactgtgattttcaaattgaaaacaactgaattttgtttagctgacctccgtcatgtaactcgttcgtaattattaaccctaccctccctcctctgaccctcagtccttttactgataaatttggaagcctgcctcctgaggctgagttgctctggttttcccataatactcccttttccagcttttatatgcttacccattaagtcagacaaatttccttttcagagtttggcattgtttctttattggaaaggaaacagattgttttaggccaggaaagcttgcaaaagaaaatagaagaccatgaactatgttttttattttcttgtttttaatcatcacatctcacgttaggatttagtgttagatctcggtgtgttttctgttcagagggaatgtgaggttcttctggcacctggtttgtctttgatgtggggtaggcacagctttacacatggtctttccccaaaccatgacataaatcctgctttttattttatggcgagggtcaggtttccagtagtggcatctggcggggtcagtaaatcaaattcctgggctgtgaggatgattttacttgtgggtgactttccctgcttgttgtgagagctcagctttagtgtcacatggcccctttttggctctttcaaattttagtcaaattgcgtggtataatccataaagtgcccatcttttgtctgtttcacagtgacagatcactgagctaggataagcaggtagcagatctgataatttatatctgtggccccaaatctttgccatgaataaaggatttttaaaaaaagttgtttcctcttggatgttggcattagaaagaatttgttcatgaaacatcacattgatactaatgatatgttattcatttccccaattacatgaatcaaaggtgtatttaactacctacaatttctgacaagaatgagataaccagtgttcctatgttgatgttacttaattgaaagcaggatacctaaaatcaaaaaagaaacagaagatttattgcaactaaatatatatttgttatttggctttggaatattgaaataaatattcaaagccatttttataatttttttaaaccatacctataagcttttcatttttcctagtgtgatatttgatttttaaaatttttgcctaaagtatttctttttttttgttagaaagtatttgaaaaacagaaaggttgtgatagttatgatctgtgcatttctctctgtattttcacaaataattcccatcaaatgaacatttaaaaaactttttattatggaacattttgaatatacataaaagtacagtgaatatcacagtgaaccttcatatatccatcattacactgtaacaaactcatggcagtttcgtttcatccattactcctccccatcagtgacctcaactggattgttttgaaacaaatccatatttgaagcaaaaatagatatattatttctggttggtcagttatgaactgaagatctataagtggccccaccccagttgttactatgtcatagattatgatttggcttagtgtacgtgcagtgacccatgtgtgcatattgatcatcaatccatcgtggctttcttagctatcttggctttcttttgttagcagagcttacctgcaactgtagtttcagaaaatagaacaggcagctcttaccatcactatactatattggcagtgaaggggaccacagtactgctggttgacatatgaagtggtgaagagcaagagaggaaaggccccagatgctggcttacactggggagtccacatggggcattggtgttgctctgaaggagagaggttctgcagctatctaagcttagccaagaagagtggaactcattttggctatttgcagacatggacatggttgcagggttcacgatcctttcagtaggatgttgtgagaatttcttatttaaagtttaaaaaggatttttattctgaagtgaagcaaacacaagctaatggaggatttctcatttggggagagggactcctctggactgtggtctccttgaatttatgcattggcggtcatttcaaatctttggagctcttttgggtcagaatcctggtcattgtttttgaatctatatatcattatccccattggaagttaaattacagacggaaccaaacatatatcatggtcagagacagaattacattcttgtgaacattatcccatgggtcattttaattagatttgaccggaaacagtttatagtagtggatgattaacttatattaaactaaaccatttactttcttattttggcttgaatatgtaaagttaaaataatttatattaacaagtgattttgaaaagtcatatttagtatttgttagtgactagtaggtttctgtgtcaattgtttattgaaagtaatacatgtaaaataaaatcagaggtatcctgtttttatttaaatttttatgtagtttttttgtaatctaaaagtcttagctaagaaaaatagagcccataaatatagtttattggcttggacaataaaaaatcaatagaaagaggtagcagctcatagttctcttaccttctgctacctacacagcccatcacaaccttttcacatcattttcccactggaaaagcagaaacaagagtggagttttatatatttccttctttgtttatacatttactttatggaattaagcaaaatgtttgaaaatatgtcattgggatagatgtgatgtaaaaactttaattctaattttgagcaattttcatttacttttatccattttccatttgattttatccattttgttctttaaaaagcaaatcattggaattaaaatctgtaaaatgttttatgtagatagaaatgaagaaatatttcaagtctaatttaaagatttccatttgtttaatattataaatgaaacacaacatggtaagattataggctggtcttaaaaattcacatttgctatttattgttactagtaggtagtttttcttctattttttcttcacaggaaaagacaatttctctctgattcagaatcctgaaaatgtgatctcccttaaaaaggtaggtgtatgtgctttttaatttgtgactaaaaaaattttatcttgaataaattacaatccagatgatttaatcgagaagcaattttttatgccactaacacgtgccattgtgaattgaattaaaacctcagattcatctttctaaattcaatatttaactttgccagtctttttaaagaatgactattttgagacaaaagttgatgtctacagcagtcaatgtatgtgatgtataataagtgaatgcttctcagcagatccatttttttattgcaatacatttatttcagctcatcttgatgaaatgtgttcctgtctttttcagtgggtgacatctttctaggaaaccaagacagtgtggaaatgtaaaatggtctgtggccagtaaaaaatgtgatatctttcattttgtggtgtgagatttctttttcagtgtgtggattgtgatttgctgcatactttgtcagctgtaataaggttgggggcattcttgggtgtacggtatctttttgtaatccatacagagcctgcaagaggtttccaaatttcatggagtgaactcatactagcttaggagccactttggctttcttttttttttcttttctgaggcagagtctcgctctgtcacccaggctggaatgcagtggcgtgatcttggctcactgcaacctctgtctcctgtgttcaagggattctcttgccttagcctctgaagtaggtgggtctataggtgcccgccaccacacccagctaatttttgtatctctagtagtgatgggatttcaccatgttggccaggctgatctcgaactcctcatctcaagtgagctgcctaccccggcctccgaaagtgctgggattatgggtgtgagccacagcctggcctttttttttttttttttttttggtttttatctcatactttttattctgaaatatggactggctctcctgttctgaaaggtgtagttggggacttggttctgactagagccatgcgttcagggagtgcctgtggagactgggaaaccgctaggcatgagtggtatggtgggtcccatggggctgtcaccccaaaccacaggactgcctcagagatttggggggtgttttaaggtcacagtggtcaaatctgaccttgtgccattatcctttcatgttatcctctagttggctctcagactgtaagattttaccttttagatcatttctgggctgagaagttagggtatagaaacaatttgtcctgatttaattacaataacaaattcgtgatgctgatggcgtctttcctcattcttctgcaacctcacaagaatgaccattcacctccagcttttaattacccatccagctagctcccagccatctctgccctgggaatggcttggttctctctgacagagctcaccaagcagttgctcacatgttacttataaagcacccacctctagatagcaaaaagtgaagactatggtccatactatatcattggaaatctagtgtggagaacgaacatacattgatttccaaattggaaatagaggagttgaagctgagttgtaatgttcggcccatttaagataaatagagccacccgtgtaaatttggcatttggacataaataaaccctatgagagtatgctagcagagtgaacttacagagaccagagagattgttgcgaatttgcttcaaaattggagttcaaaaacctgctgtatgcaattattgcagtgaattgactgcataatagttaaataaatgttttcttttttttctcagattatttatttaaatgttggcttcaaagacgatatagagaaacatgagttaatcaaagacagagagtgaggataatctttgatagaatgatgactgcaaaagagctgttaagtgtgatataaatgctgagttataaaaatacacttttaggaaatccaaattattaaaccttgatcatcttgaataataattggacttaactgcagcataaatcatctgcatcacgtatctgctagcagatatgtatagaaaaaattcgactttcaactactaggaaagttgctttttcgcatttatccaacattaatctaaaatccctcttgggaataaaaactcacatatctgcaaggtcgccagacagttaggagcacattctggaaaaggctcctcagctgcatgggtgacagagcccaggaggctgtggagtattgtaaaagtcctggagtatgtggcaattaattcgaaggatgtctcatgtgttaaatagtctcatatatatatacacatatatatacgtatatatgttagtctcatatatatgtatatatacatatgtacgtatatatgtacatatatacatatatacgtgtgtgtgtatatatatacatatatgtgtgtgtgtgtgtgtgtgtgtatatatatatgagactatttaatacatgagacatccttggaattaattgccacatactccaggtcttttacaatactccacagcctcctgggctctgtcacccacgcagttgaggagccttttcaagactgtgctcctaactgtctggcgacgtatatatatatatgtatgtatatatacgtatatatatatgactattttaaaactctgtatcattcctgctataaggaaatatatatgaatatgaagtgttactgaattaagaggtgcttttttattataatgtattttcttaatcaatagaaattaaatctactttatactactaccatttatactactattataaatggctaacaattcattttgacattaaacatggttctcataatcaaagaagctcataatcaaagaagttgaaagttgttgctctagaacatggggaaggtatctgaatcatgttaagattggatccatgattcgagcaagacagggccagaatgtttttaaatagtcagaagaaagaaatactcagatgtttattttattagatattagattaggttactaggggcaatagaggaactttcttctataaacttttaaacagtccattttcttgtatggtagcttggttagatgtattcttcagtacgaaagctagcagccacatgtggtcatttaaatttaaccacatatagttattttaattaagaaaattaaaaattgagttcatcatttacaccagtcacaattcacatgctcattagctacatgtggctagagggcagcacatagaacattatcatcatcatagaaagttttttttttttacagtgctggggacaattgtcatcactaggactgctccatgccacaagtagtaccaacaccacaaagctattcctaggggctttgcccctggggtcctggcatggaatggagaagacaaagcctggtttaccctataaatcgtgggagatttttatggacaggagtccttagtgaatgcgtggaaaagaaaattgtttccccataatcttccagctcccctccctttcattatggcccatatcccctgacaagcggcaggggtccatgtgccagtttgaattaacattttattgtgtgtacagtagacatttatccccatttgggctacctggtatctgaatccttttcctgaatttgggggcattcgtcattgtgtgaagctgggtggataaaagtgtcatttcttttaacttcccaagcagaaatgcccacttttgtgtttttcttgatgtctgccagcaagtaggcacactcatgggacttcaggtttgtcacatctgggactggggctctggcgagatgacttagagaggcaatggtttggaattctgcccatcactggtgcgggcaggaggaccatggtggcaggtccagagccacctgtggtgaccagcaccaacagtgcagtaggtgaaacagagttagttactgggaacaaaagcaatactaatggaaacagccttcccatgagtataaggagctggactagtctcccttgttctaatggacatcctccttacgtggaataataacaggacaatttaattttatttgttattgttaattttttttagagacagggtcttgctctgttgcccaggctggagtgcagtggcatgactgcagctcactgtaacctcaaacttcataacaggaaaattaaagaaaaatcaaaagaaaccacttagctgtaacacaaggaagatatgctgacttgtttaatggaaaggaatatactttaatggaagaatacatatatcagaatttcaaacatcccccatggatttagtaatggagcaactccattttttgtttttgatagagaattgtgtttataattctgtttcttacatgcaccatgtaatcaaaactgttgcctgtgaataatcactctttttctgattcctacttggctaggctggtatgcctgttttattgcttttccagaacagatagactcacatattgtttcacgttatgttttgagttcttaagcatattgtctcttcctcctgtgcgctgattcccactttcgtgcacacagcagctgtgtgaccatctgcatcatctcgacagtgccacagcttcctccgtagaatgctacggtgtgtcgcccgtggagggattcctcatcccaagcatgatttttatgtgggtaggctgcccgcctgtgaggtgaagtttctggtggcccatttcttcatatttcatgataattggtcagaggcttgcctggcagtggaaccatcaccccagggacagaggttgcctgctgtccatcatcacttatgctcagccctcaatagaaaagaagtatggtgtgaagcagccgcccaaccagagagactggtggaacagcctccatttgtatgtaggtgagctacatgatttgtcctcaccaacacaatgtgaacagtcctgtagggcaaatctgggacaaggcgtcgaaaccccaggctctatcgtcctctttcctgtggttagattcagatgactgggaggcctgaggggatggtgagagacaggatcaagtgaacctgagtctaaatcattgcgttatggatggctcctcactattcctattcaggaatccacatgttcctgaacagaaaatctttaatagtcatatttgccgtctttcccagtaacaaactctatacaatgaaagatggagcataaattatgcgagcaagaaagagaaatgaggttctattatgttaactctttatgtattttcagatttattcattgcagaggctgacattacccttgtacaccctcattcagccacataaatctcattatttctttttatcaggtattagctgacattttttcatttttcagttgcccattatgtggaatcatcttcttgcactgagtagtagcatggcttatacaagagtatgattatggcctacatacatttccctacatattgcctagtgttgcttacagataggtctaagagttagaggaaagcttagtgcctcattgtaaaaacaatttgccagttttgtaaatcagcttttttttttttttttgagatggagttttgctctgtcacccgggttggagtgaagtggcatgatctcggctcactgcaacctctgctccctaggttcaagtgattctcttgcctcagcctcctgtgtagctgggattatcggtgcctgccaccatgcccagataatttttgtatttttagtagagacagggtttcaccatgtttgccaggctggtctcgaactcctgacctcaggtcatctgcctgcctcagcctcccaaattgctaggattacaggcatgagccaccgcacctggctgtaaatcagagttctgagtgagtttttaatcctcttggatcactacaaagattgcggtaactgagaatgcaagttcagtgactaattttgcttcataaatgtatagaaaatggttgatggtcttattagaaaacatttcccaggcttaatagttctgtatagatgatagaggtagccaatgaagatggaaagagggaaacaattatacaaaatcatcttagattacaacagaaggagaaagtatttgatactcatttaaaagcagcaaatgcggtggttcgagatatacattttgcttttggcatgacatgtaaatgattgcttggcagagatgaagaattagggatttaatgtttttgctttttagtttactgtgtattaactaataacattttcttcttctacaatatggaaatagcaactgtatacctgtaaggttattaatggaggttttatgcatgctgatatatttgaaatgtttttagttctttaggagaaaagtgcttaataaacagaaataactacttatgttaacagtttatttctgttgacttaatatacctactttttcctcttaataatgccagagcatatttgggggggggctatagcttgaacaaaaataagacattattaatatcagcactttgtaacctgagacagatgatttaatctctcctgccatgttctctggggtttaaaggtgctattcagcaagattattatgaacaccaaaaaaagtctgcataaaatagctgcttggctgtcacttccatataagctatgaaggcaatgatgacaattaagtctaggacttgtaggaaccacatatactcactcctactgcctttgttcttcttcatgtctgctctgccattgtacttttttttttttttttgagacggagtcttgctttgtctcccaggctggagtgcagtggcgggatctcggctcactgcaagctccacctcccgggttcatgccattccattgtactttttaacacattggcatatactctgtgctgactactccagtatggagtgcttctcaaactttttggtctaagacccttctatactcttaagaattgttcagagttctaaacagctttttaacatgcagcttatatcataactatttgctatattaaaaagtaaaatgggaacatttacaaatacttattttaaataacagtgataaacccattacatgttaacgtaagtaagaattttttaaatgaagaattactgtatttttccaaacaatatatgtttggtgagaagaatggcaccatttaatatttttgcaaatctcttaaagtcttgcttaataaaagatacgtgaattcccttatttgcttctgcagtttattgagatattgaacatgatgaaggctctggaaaactctttcagagagtgagaataataaaaggaaaataatttcttagtatcattatgaaaataattttgacctttcagaaccctgaacttgtcttgagcacaaaatttgagagtgattggtctacgttaaatccccgaaggttgtctttagagtatttccagttttgccacatttactactttgtactagaaaatccctttcccatccaaaatattagtaaataactatttctatctagttaattcttattcagagaaataactaagaggctaaattataattgtttaattttaggctgcaattttcccatttattaattgcatcttcagaatatgctggcatcttaacccatttcccccattctcacagctgcttttaagtcatttttctcattgataagcactattatgagagcctctaaattggtctctgttccagttgctattgctgtgcaacaaaccaccgtgaaactaagtgcttgaaacagtaacaaccacaaatctgcagttagggcagggtttagcagagaaagctcatctctgccccttatggcatcagctggggatattttgactgcatgccagaggatccacttttgagatgattcacctacatgcctggcaagttgatgccagcagttggctgggagctaagaactagggatttccgtcatcaccatgtgggctctcaatggactgcttggtcttcctcatagcatggtggctgagttacaagagtaagttttccaagagatagaagtaaaagttgtcactttcttaaggtctggacatgggaactggtctagtgtcacttctgctggattatagtcaagcagccacaaagcctaagttcaaggagtgggaatacagactcctacctctcaactggagaagtgtcaaagaatttggggaccatgttttaaaattaccatactctctctgcctcagtccttctcacccgcaaattgcccagtatttgcatcttgtcctcagattcaatttcctagaacatagctctgtttgtcctgtagctccccattttctacctaagaacaaaattagtcttgcattcagaacagtccatttattagtttaccctattccttctttagtataccctgcgttttagcccaaatttatctggatttttcttcttttgcctttgattatactttttttctctcttcccagaatattatccctttaatctcttcacatcctaacattctgtcctcataataaatgctaccactcacatgaagacttccttaagctctccatccttctgtagtatgtctttctgttacctctcatcatacagtttaactgtaccattttaaagacctcccaatttctgtcttgtacaataatatatgtatattttatatgctctactagattttatgttccttggaggagatccatatttttaaatataatattaatctttagttgctctgatatcttgagatatatgtaacaagtgcttgatttttaaaaaaatgagtgaatgaagatatgaatgaaattaacagagtatgtttagactcacctaaaaagctattagaagtactatgattgttgattaaaattgctggttagccgcaaactaaataagtaaaaattgatgatttaattaccaagcataaatattagacaatattattaaaaagagatcacatccaaaataacagtacaaccatacaaaagtttggaatgactttcctagaaatgtatggtaggaactaagtaaggaaagctacaaaactgaattgtaggacataaaatgagtttcatattagtggagagagattctttgttcttggaaagccagattcagtgtagtaatacaaaaatatcagatttgttcatttgaagtgtacactcagtacaatttctatcaaaactagggaacttgacaaaataattccaaagtgcatctggaagtatgaacctattaatactctcagaattacaagaaatacttatgaggggcacttggcatcttagatattaaagaatattttaagtcaatgatgattgaacaatggtattgatacagggatacatcaatgagtaaaatattaaagaaccttgttttacatacacatgtatggtaatttagtatatgataagattggtgtttcagattggtaggaaaaagattaattactcaataaaaggtattgggacacctgcaaagtcttctggaaaaataaagcagggtctctaccacactgctaatatagaaataattctagggatcaaaattatacatataacaagataaactgtaaatttatgataaaaatctatggataaatatttttacaatttatgtgtatgtggggaagtcatctctaactagaaaccatgaaggaaaggatttaaaaatgtgactacatatacatatgttttacatctttatttttcaaaatgtcagcaaccatctcaacttgtttgaaggacagagcatataccgggaaaacatttacaaacaatatgatcaacaaaggctgatatttccaaagtataaagagcttttaaaataaactctgacaaccttatcagcaagatgaacatttaataaagttgtggagttaaaataatgaatatggggccgtcaaacatataaaaagatggtcaaatctgtcagcaatcaaaagtgcaaattaaaccaacagtggtatattattaggttggtacaaaagtaattgtggttttttgcatcaaaagtcatggcaaaaaccgcaattacttttgcaccaacctatatttctcggtaactaaaatgacaaataaaaacaagcaaaaagttcataattgatgatgctgtgggcaaacagtgtagttttttttcaaactgcactgaagggccatattttcccagtctgtttttgacagatatgattgtaacatacagtaaaaataagtagccagaaatcaaaaatcacagatattcggaataaaatatcaaatatgacacacatgcacacacacacacacacacacaaaatgttcatcagacataaaattaactctctcaaagtgcgttaaatatttctaaatgtttactctcaatttctggacctatctcagtggaccagtcaggaacattttgcagtctagcaccattctatggaccactcttagaatagcactcctttaatgtgccaatgggaacataaactgggtcagactttgtgaagggaagattggcagtatgtataagattttaaatgtgcaaacccttctatttctaggaatttgttgtaaggcaaattggatagttgtgtaagattatttatcctaacatctttggtgatagagaaaaagatgaaacctaaatatcctccagtagggttattggttaaatagttatggtagtcagactgtggaatactatgcggtcattaaataattaagcaaatgtatattcatttttcattatagaaaatttcaaatatacacaaaagtagaatgaatgcctaaaccatctccatatgaccatcacccagcttcaactgttacccagtcatggccaatcttgtccctgtcccttcgattagttgtgtgtttatttgtgtgggaagattatcttgaccttttgtaaagaaaaaccaggttatagtggagcatttatttactcgttcaacaattatggattatactcttatgtctgttgtggtactattctaggagctggggcttcagaagtgcattaaagaagtaaaaatctcagcttgcagcttaaattctagtggggaagatggaacaaccaacagtcaaaattttagcatattgttactgattatcattacagagaaaagggggaatagggagcagagggtgtgttgtcattttagaaaagattaacagggaagcctacccaccccggcctgagatggtggtctttgagtcaaggccctaagttgctaaggaaggattacatgtcatctgtggggggcgacctcctcaggcttttgggggtgggaggtagcaaatgccaatgccataaggcagaggtgagcctgctgtttctgaagaagagcaaggaagccccggattgaacatgaggagagtgctgggagattgggcaggagggtggcgtagggaggagggtcttatagtcttctgtgtggacttcgactcctgctgtaaatggaatagggagcctttggagaattgggacccaagagtgctgggatgttacttttgagaagactcacgttggctgctgagttcagagtacactgtgagggagcacgtccagaagaaggagaatcaggaggttatgttcctgtgtaatcaagggagattgggggatattgattttaacgaggtttggagggatggaggtggtttgaagaggtgagattctcgatctcttttgaagatagagtcagtaggatttgatcatggattccacgtaaggtatgaggaaggaagaggtggtgaaggggattccaaggttttgtgcctgggcaattgaaaagatggaagtgctatttgctagaatggggaagactgcattatgagaggtttgaatggagaagatcaggagttggttttggatatgtaaaatcatgattcccattaggtgtccaaaatgaagacagaaccaggagttagttggatattaagagtctggaattcagatgggactaggctgaagatgtgtaaatgtgggagttgtgagtctggatgaagtcactagaaaagtgaatgtggacaagaagcaaagacaagactcagaggactgagtctaagggcacttagagggtggggagatagggaagaatcagtgttagagatcagggataaagtgagctaatgaagtaggaggaaaaccaagggcatatggcgtcttagaatccacctgctgagtgtttcaaggagggaggattaatcagaggggctgtcaaagaagatgaggactgaaatttgactgaacaggaggctggtgcaaaagttggatcagcacaacatgtcagcttgaattccttgctgaggtatgaattgtgaagcatggaaatgatgatgatgataatactaattattattaagaattcaaaaggaacaagatcttctttttttttttcaagaatgccaaatatattccctaccattaaaattggatatagcagccaaaaaagaaagaaaaatgaattaaaattactgaaagacaattttacatgtcctgtcagatagtttaatttaaatataagctggttgatccaggtgcagctgcccaaacttggaataacatgggggaaaagcctagtgagaaagcaaagccaattgcaggagagagatacagagtgatgagagagagaggaagagagaaaacaagagagagagagagagagagagagagaaagagagagaggagaaaggggtagttgaagtaggttgcataggaaaaaccaggtgcctggtaaactttattgagtcccagaaatgtaaggtgccccccaccaaaaaaaagtgttagctgctcttaacactaactttagcctgaatagacttgaaaatgtatacatttttcatagatgaatactttccctgatacttaaacaatatagcacgatcttcagagcagagatgtgaatttgtatccctgggtctaaagtattgaacatttataaaatggtgtggctataagagtaccagaattgtgctggagtttcagtttcttctttaggcagttgatttgattaaaacaaaagaaaacaaaaataaacaaccaactcacacttctggtcctttctctggaaattatgaataaaaatatcaataaaactttaaaatagaattttagcagtctccctatttgagaaggagaatctcacaattttcactggtaggcaattcatgtgggattgtaatgcatgagtgtgggaaataaataaaatgattgcttttttttttttcgtaatggcctaaaatgatagcttcttgatttaataaacctttcccctactccctaccaccacccctctgcaacttacctacaatacacatattctagtgcttatcaaattataaaagctgggctcatgaaataacaggaggatttttgttttctgatatcagtcaaaaattgtttggaagacaggcagaacaagttaaagtgaaagcctaatatagtgaagggaaagatttgtgtgccagccacagatggactaagttcgttctcacataaatattatcctttttttcttgccaggactgaactgcagtcattgtcttaattaactcagggagttttcagttacagcttcaaaatctcagtcttctggaaattgtcatctggctttgtgttgtccctaagtagctgtgtgacctggagggaggcacttaaccaattcaggcctcagtattgggagtcaagggtatggaggcccagtttagctttcttctagccctgatgttctgtgaatctgttattcaagtttatggacaagttcccacagagaaggttagtagagttttttaaaattattattattaagcaatgggtattttactaaacagtactcaactattttttgcaaagtgttaatttgtagaacgttttgaaactccgcatagaaaatgaatgcacaggtcaaggctaacatagcctttcagccatattgtctggaattgttttttttttaaaacatataataaaaattaaagttgaagaagaaatgccaaaaatatatttttgatggaaaataacaacttacactgattagcatttatttcaatgaaatatgaatctttaaaacataggatttaaacatctttcaatggacatatacattattgtctcagattcataaaaatgtcttgtaagctatcatttctcctctatttacactgtcttttgtgggggaaataaaaagactaaacagtgtttagattatctctacacattttacatttctcccaaaggctgctgtgtaatggttggcatctgagagaataaacaggaaattagtgaggctgaggttctccttcatcttttgccagggctggactccttgcttcatttattttcataggacaccagaaatctgagaacagtatttaagctgactacgtttcttttatagctggccttttatagatggtctacatgtggcaatctacagattgccagatctttctccttttctccaacttagtgtgttggcatttgaagtaccaaatgtcctcttcaccaatgaatagtttagaggaagatgaacagtgtagccctttaggcatcgtaaaatactgtattttttttcataatcatgaaggtaatatgtttgttatagaaaatttggaaaattaatataatccaaaatcctacaacccacaaatcaccacttttgatattgtactgttgttctttttggtctttcatcaatttttttgactacttgtattcattaagcaggtattcaatttattattcaaactgtttccaaggtgagctgctaagaatgttaataggtgttctgggtcactggggacattgggaaactttccatgtcatatacgtttgggaaaatgccagattgaacgatgttagacttagatttgtcacagacacccccctcagggatgagcttcctgaaagggctctatgactcttctctacttgggaaggtacattgggcaaagcctggaagttattggacagagaactggctttggccctgcacccactaatgttgtaatgtggtgttcttcagatggcagtgtggatcttatttggtttttgtttgttttacgaaattgagatctcatgcttttgtaacctccttttcctacttaatatattatgaatgttttctactttaaatctgtttttcaaagagttgctttctctcattgttatttttgaaaatattccatttatgaaagttccatttatgaagctggggcctagcccaggtgacagatcatttcagtctgtggggatactcttgaaaggttctgtctgggttataaaatgtttatactcatttgaaatgtttccatcttccacccacccattctgacaaacctttaattttggacaactgctgttgaggctgtggattcacagttcccaaagccactgctaatttgtttgctttggaaagacctgacaaaaatagacttcttttaacacaaatggataattttctcccattgatgggcagttcatttaagaatattttatttattgtattataaaaatagcctctttgagacgaatggcctgctccaagtaactctcataaaacatagggattttcttccatacagaaataattactttgatttaaaatgggatattgccttctcaaagtattttttccactatgaagtatatagaagtatgtatttaatgtgtcttaaagtccactagtggaagtattactatcaccttttttcaaggctcattacctaaaatttttctaaaattaaaagcaaagacaaatatgccttacatttagaccaaattaaaaaaatggatctttattttggatagtccctttacctgtgctttactttcattatcacaaaaatatccttaactcttagcatttcataacaactgtgaccaatttttattatgtagttggaagtgttaagaatctgaagagaaggccttttacagtgattatctttgtgaacagtgtttagatacgttttggagacctgttgaaacaaataccctactctttttttttttttttttgagatagagtcttgctctgttgcccaggccgcagtacagtggatgatctcagctcactgcaacctctgcctcctgggttcaagtggttctcctgcctcagcctcccaagtagctgggattacaggcacgggccaccatgcctggctaatttttgtatttttgtagagatggggtttcaccatgttggccaggcaggtctcaaactcctgacctcaagtgatctgcccacttcgacctcccaaagtgctgggattacaggtatgagccactgtgcctggcccaaataccctactctttattgattgtctcacactgattgataatggtcagttcctcaggcataccatatgtctttaaaatattataaaaaactttgtaaagtcttttgttttataaacagcttatctgggctaggcctggagcatattcatagactgtccctttatgcaattcctgggcaagtgcatggctttgaaaaagactggagctgaaaagcataatgtgtacttttggcctggggattctttatagagagtatgcagatttccccaaggaaaactgattttgcatgcaaaagctgtctctataattataacaatttcctcttgccctttttaaaaaaaaattcagcttctcaaattggtacgtataaaattttaccctttccacaaaagcaggccttgctgaaggaactgactgctgaaaaatctcatgccaagtccctaaagcagctaaagggagacattataagttttgaaatgcagcagtctaggaggtgaaggaatggcggtcctgtgagccttgacatcaatttatgtgagtgtgtgtgcaaggtgccatcccacagcttatacttagaagaaaaatggactctttaaagtaaagcttgttaattgagtttttctttttctgagggttgtgcttacatggtttaaattgtaataaaaattaaaatgcttgaaatgttttagagtcggagccctttgctgctttagctcatgggcacctccaagaatgcttcctcagatagcagcacaaaacactggcagttctccaagagaacattctttgagaacctcactgtgattgggaaagggaacttcacattctgattgtgcagaagtgcccgcgggatgtgtagtctacattctaaggttgcttgttgtcttccatggaaagtgttattttattatatctttcagatatgttataggtgggaaaatccgaataactgcttttatcttggtcaggaaatacagggaattggtgtactggggaagatcacatattacgagacacactttaattacctttgtggagtattacttttctaataaccaaacttgttaaaatgctaaattttatttgtgttttaataacccagattgctaaattgctaaataatctaatatactaaattgctaaaataatgccaaacataattaaactttcatttggttctgaacaattttcagtgtccccaagtcattatcaatattgcattaatgtagaaatctagtcatttggcgtccctattaatagaatgccaaacaaattgagtcagacatatatacctagtgttgtgttgcatgcagcagggtagaaagggagtgcctaatcaagctcacaatgtgatttttgctcaagttgtgatgtctggccaggcgcagtggctcacgcctgtaatcccagcactttgggaggctgaggggggcggatcacttgagatcagaagtttgagaccaacctggccaacatggtgaaaccctgtctctattaaaaatacaaaaattagctgggtgtggtggtgcacgcctgtaatcccagctactcgggaggctgatgcaggagaattgcttgaacccgggaggcagaggttgtagtgagctgagatcatgccattgcattctagcctggggaacagagagagactttgtcttaaaaacctagagggacttactcctgttggaggcacacatttctaacgagataatttgggattgacataggactgtgcttaataaggtgttcagaggggtggtgctgatgctaggaacggagaagacaaagtaagatgatggcaatgttgagttaagctgggcagtgacctgatttgtttatcatttggaggagaagtcagaaaaaaaaagaaacagcctaggtagaggattagagatgagtatgaatattgagtgtgtcagggagggtaatgatagtctgagctcactgcattaagatgaagtgttaaacactaataatgttgaagcttattccaaacccctagcttttcccctttttccttctaattactactcagcaaggtaatgagtgatggctcaaatgtgggattaatcaggggaggaagactatcaagttctgttctgtttgtgcatccaggggagaagctgcttagagcagtagccagttgttgtcagcactcttcccccaaccccaaattaaaggcagctttctggaatcatattatggcacctggggaggattaacatggcttcctaagatgcctgagtaacgacatttcttcctgtcaaagcacactgctgtaaaagaacacacttcctgatgatggccttgaccgacctcacgtttaagggcctgtgcacagttctgttacctggagtaggtgatctgtgacaccggcctttggttgctgtgtttggccatgaatccaccctgatgactatgaacttcacagagtaattggccaggatatcccttcccttactgtcatacttgctgaggtgttagttctgcaaatagtatcctttgtggatctttgtgtttgtttgagtaggtgaaggactttattttatattctttttctctagttacttccttattttaataagtaaaccttattctaagggttagtttctatgctgagaacagtgggtctctagactacttaaaattttccataaatcttacgttattcattttgtaaatcctgaataaattgaaacgagaacagtgctgatggtcctcatagaaactgaggtggaatgtgtacacattttaaaatttatttaaatgaggtgcttctaggtataacacatatataaccctccctatatattatttaataataaaaatacctctacactatagtgctttatgaatagatttttaaaacttcttcttctttttttttaatactttaagttttagggtacatgtgcacaatgtgcaggtttgttacatatgtatacatgtgccatgttgttgtgctgcacccattaactcgtcatttaacattaggtatatctcctaatgctatccctcccccctccccccaccccacaacaggccctggtgtgtgatgttccccttcctgtgtccgtgtgttctcattgttcaattccctcctatgagtgagaacatgcggtaaaacttcttatagtataattgaaatgtaaatttagtgtaattaatatgaatttattcatttaatttggattattgatgggcttgattcttcttaatcctaatgaatacttgcaggccacaggtagttgtttagcattagcaaagtttatcttaaattatttcatataattatattttaagtatgattttaggctctagatttggcctttttcaaatttgtaatatgctttatcaaacattaaacaccattttaaagtaatgtaacaggaatttgggaaacagaaaaacatacctcttttataattttagtactttaacataagagccaatatcgttttttgtacattttgaatcctccacatggaccacacatatttatagctagaaatgtgaatatatatatataattttgtattattcttcacttataaaattagcatttctgatattgtatccgtgtgtgtgtgcgcgtgtgtgtgtgtgtgtatggcttcaaatcttttatgaaacaaaatttaaagttatgaaaatattagtgcccagttcaattcccctcactccactccatttcacattccccagaagtaacttttcagaattctatttttcttttctgtttatgtttttatactcttgtctcatgtatgtgtcccttatatgtacgtataagatatatatgtgtgcacatatatatacattgtgcatgtacatagatacacacatgcagagtattgttgtgtattctaaaaatgtacatatctgcaaccattttgtctgcccagttctattccattagttttgcctcacctatccttatatcagtatcacagagctaagactaggatgaggcaagcaaggtgcgctggacatagaattggtgcagacatctgcccttaggctgtaggagcctcggttgccttccctaatctcagccatgacaatagctttatagaaacttttggtatgtggtaggttgaagtcttggctatttttggcccctttacccttcaaataaattttaaaaaacagcttgtcaagttccatgaaaaaaaatcccagtggaaatttgacttgaatatatgaaatttatagattaaatgagggtggggaatggacatctttaacatatcgagtctacccacctatgtatatgctggctctaactattgatttaggtcatttttaatgtctctcaaaaattactttttctataacatcctgcatgttttttattcaacttatttctgcatgccttagagtttttgttgttgtgaatgtgaatttttaaaactgaattttctaattcattgtggttggtgtatacgaaagcgttggtttttgaatgtccctgctttttctgcagccttgcttaacactccaatttgtccgaatttgtctacagattcatttggatttcttctgtagagaattctattatctgtagttacttggttttcatacttgtaacttaatgactatataatacttcattcatcatttactttgctgttgaacacatgggaagttcctgatagcttctattttaaatacaattatagtgtacaccttcatacattttttcacctttccagttattttattgggattcaattttgtaatttctgtcaaagggtgtgaacatatttttacagctcaggatatgtgttgccaaattgctttgtagaaagctttaaatccttttacactgccaccagtagcatgtgagagcatcagttcaaccacattgatttgaatgatggaaatcgcacctggaatgctgtgagtcttctgactgatttcctgtgtccattcctatccgtgcttaatcagtcctccacacagcagccagaattatcttcaaaaatttaaataagattgtgtgattcccctgctgaaaaatcctccaatggctttcctttagatgtagaatttagcctaaacttccaaccaagattcctatattctgacccttttctttcttctaacctgctctgcttttgttctcctgtgcctcggctacactggccttcttgctgttgctgaaacttgcttaccttattcctaccccagggcctttgcattggcagctccccctgcctagaacattctccagctcattatactactacctctacctatcgtgcatttttcttgctcagctgtcacttccctagaacagacttccgtggcttccctttctaaaataaccctttttggtcacattcttttctcttactttattttctttacatattttttattatctgaaattatataagcttgcttattatttatttctttgtttaccattggcttcttcaagtagaatataaagtcctcaaaaaaaaaagctttgtctaaagtgttgactatcattatatatcaaattttctagtggcatcctacaaacattaaaagaaaaaggttacatgtgcacattgtgcaggttagttacatatgtatacatgtgccgtgctggtgcgctgcacccactaactcgtcatctagcattaggtatatctcccaatgctatccctcccccctccccccaccccaccacagtccccagagtgtgatattccccttcctgtgtccatgtgtaccctaaaacttaaagtataataataaaaaaaaaacaacaaagtgcttataaaatatgagaacagagcaacggtaagtgcaatcttctataaacaaagaatttaataaaagagacggaaataaaaataactttaaaaagttaaaaaaaaagaaaaaggacaaattaatattaacttttaaagcatgacatatctaaaatattattttcatgcataatcaatataaaaattatcaagacattttacattctttttttaattaagtcttcaagatctggtgtgtaatttacacacagcacatctcagtttgaatgagccacatttcaagtgctcagtagccacatgtgattggttccttccatatgtgacagtggagggctagaacagaacaatgcctgagacacagggaaaaatcattagagactcgctgaatgggtgaacaagtgaatgaatgaatgaattttatttagcatgtgtaagtaatgaaaatccaagtcaaattaggagtaaaatcaagatcccataaaaagtgatttattgttagagaaaagtgaggcattagcacatatcctttactggaacactattgtggtatctgaatgggctcagttaactgtcacctttattaaggctctcatgtgctctgagcatcttgctaggatgagaaaaataagatgaaattcttaagatatcggaagtctggtgagttgataagaacttgatgcctaactgtgttgtacattgtacgtgttactgaaacagctgtgggcatcatgaattaatttttcccaggcttttattcatattcaaaagcttagactaatagtcacattttattaagtacattttatgggcccttagcattttgctaaatgctaagggagcaagtatttgccctcacactattttaatgtgtatttctctaggttacattcttaacttacctgcactatcctccaagcataattcttcaaattttcagctgtattgagattctaaatggacttccaatgtggacttttcttcgttttcagcttataattggcaagttcccataggaaaaaatcattattggtgctataaaagtacttcttatctgtcacatttgggaaatgaaagttttgtaaaggtcaaaagaaagtgtgcccccaattatgatgaagacttgtacatcatcacaaatagtttaatagcttggaacttatcttagtctctcttacagtgtataaagagaaaggagaaaaaaaaaaaaaacaaagtagtcactccatagcaattttaccatacagttttaggagagatgaaaaggatcccatcgaaatcatttgatcaacatctatctatatcttctttgtggtttggaactgtttaagttatataagcctacaagtttattagttcacctttattaatttgtcaaggttaatgactgcataatgagttgaagataattaaagatttgttggcaaccatctgctagtgtttacgcagtacggtaagttttataactcatcttgtaatgtttcctaaggagattctttgccaccttactaattttaaaaacacaaaccacgctgttgccttaggcagtgtaagaattcttttccttaatcttttagcatatgacagcctattaggaagatcagatgatacacctctaagaagccgggagtgtgtttgcagacactgttgagagtggagtgataccagccggtcggacacatgacctggcagttcccctttctttcagcaatctgctttggcagccagtctgcctcgggcatctgtgctaattattctgccccagcagcagagctgtgggcactgctctaagaaggatccctccttgctctccttatgtgaaggcccatctgcgttacggaagtgaacaaactgactgagtgcagtcttctcctgagtgcctactgtgtgcagcctcattattaatagataatgaagatagccatgtcagattaaaaggagggattgggaacagttcaaggccctctctgaatgtcttattcaaattcccatttcatctgttctcccttgacacgctccttttctcaaactcctgaactcaagtgatccacccaccttggcctcccaaaagtgctgggattacaggagtgagccaccgtacccagccgacctgctccttttctaaacctctctcttcttcctttctctctcttagcaacatcttgccatctccccttctctctctttatagtgagtaattactagttgctctgtattctagttccaaaatctctcccatgttcatcctcttggatccattgtctgggtcaatactacttctcatctgcagagtgtcatttgcttcctaatgggtttccccatatgttcctgcactcccttgacccaagctcacctccactcaccttctggaagcaccattctgatcccaaggtgccctgctgcagtcttccatgggtttccacggccaggtgaataatgtcaaaattccttaactagaccgtcaggagcctcctcctccatgctatgaggtctccacctcactcccagccttatctgccttccctgaactgaatggtccctaaacaaaatgagctgctctcttttggtgtttccacctgctcttgaggtccccacctgagctgtcctttgccccacatgtgttgttgtgccatcacagctctcagccccagtgccatctccctgaagccctcctcacactggaacctcaccacacccctcaccgggatgatctacccgtcttgaccatctcctggctctttagatctctctggaaggtctcaaagcttttccctttgttggattttatccacacaccattggaggccctacctgtcaatttccagaaggcagtgcgccattgacccacttttgtggccaccacagtacccagagagcacttggaattcacctaacacctggatgaatgtttcttgaatttcttagtccctgatatggaatattccttgctctctattttttttaactagtttttttgtttagtaaccatcacccacaatgaccagaattttctctccttgcttctggcttctccacagggctctgaacgccgcttacgtgtcgtcccacctgttctctatttttgccctaatttctcaccattttctgtttcttctgagttgtccattctccaccctttaatttcaattagtcagtcgtaaatatttgtccctatggcaggaccagcttttgtctggtctaaatgtaggaagtggcttgtttataatttcctagcacaagtaggccagttactgaacacaccgatataaaatgtactactagaatattcagaaatcctttagggagaattgctggttttcctgtgaaagggaaagacaagtcttcagtggaaacagcactttaatatcaagttttgaatgaactgtattcatttcattcaaaactcagctctgacaaatatgggtaaaggacatcagtttcagaaatgcaatgcaatgcttgcaattatggaaattatttcatgttttccaattgcttatattaggttgattatatttaatgtttattcctgacaccaaatttatgtattttagttataaaatttgtgaattatagctgcaaaatattatagttttcaagtcgaattattaccagcggcattcctgtcaactttgctttcctcaggactttcaaatagaaatgttattaaatatttcctttttgtcagtgtttgcacttgaaggtaaatttaaacatgagtgtgttgtttggtttctctcattgtggatggactagctagtttaatatttaatggcaagttttgatgtatactgataagaagagagacaaagaaacattattgtatttaaatattatctttctgattgtaaaagtggtgcttgtcgtagataactctgtaaattcaggaaaacataaaaataaagatcactgttgttttaccacacacaaaaattactataactataactcgatgttatatacattacctattatatactgtattttaaaataaaattgggattatattggacatacaatcctgtttttttttctgttaacattatattgtgattacgtcctacgtgattttgttttaaacatggtttttaatggttgcatacctttaaaacaggaagaattataagttatcccaggaatcttctgttactggatacttaggtgttttgtttcattgctttaaaatcatttctactcctcttcacaatgtggatacttgggaattgtcacatcatagtcaatttcacaagacaatatagattaactagccatgcactcttaatgtacatatgcagtatttcagacattagaagtagggagatcagttttgcttgatgcaggcagttaaaaatcacgcgcatgtaaagaaaggaccaattttacttgcctcagtgttggcccaagtttggagactaaagcatttacagaccattagctctatacttcactcttgagaccacttgttgtaatgagctgtcaattattgtgcatctaagtgtagttaaagggaccattgggcttgcagtttaaaagccaacatttataaatgtgtaggaattgaattataaatgcagtggttcagtaaggatgtactgcatcatggacctgtctggatacagtatctgttctctgaaagattttagtgttcattaaaaacataagaaacagtaaaaatgtactcttgagcatatagctatacaatttttatgtttttacaatatagtttgggaaaaatatttttttaaatcaagagattttaaaaagtaaaaaacatttctttactaaggtatttattaaatatgcaatgaattaatttcagctgacatgttggagtgaggagaaggatggaaattggagatttccatttgattcagtgaagctacagtctattaaaaaaagtatattcttcactacctgtttatcattagtttttgaatagtatttgcctttgaaaatctgtgtactttgaaaatattttactgcagcttgtaaatatggcctgagtaacatttcacattttttcatggttaaagatgccttttgctttgaatgtgccaattctaaatatcactcttttaagaaactcctggaaatctcctctttttttttttttatatatatttcagctatttaattttatcatgttcttaaagtcaatattttgtatgtgaagagtgccccttaaagtttatttcttctttttattttttaacatgaagtaatacctgcttgctgggataaacaatatagatgagtaaaaaatattttgttcaattccaccttctctcttcattttctcatcttccctagaggcaattaccatgaacaatttggtgattatttcttcagatctttcacccaaacttttacaaagataacataggtagataagtaggtagataggtagttgttgatcacagatgtaaaataggttttcttatataaatgacttcatttctttcaaatggtatacaaaacctgtataacacagttatttacagatctatgttgtatgtagctgtcacaagcaggagttggcagactttttctgtaaaaggccagaaagtattttgggctttgtggagtataccgtttgttgtgattattcagtgttgtagcacaaaagcagccacaggcaatacctaagtgagtgggtgtgtgggactgggttccaacacatctgtatttatgtatgctgaattttgaatttcatataattatgatgggagttgaaatattattcttcttttaatttttttcagctatttaaatatgtaaaaaccaatcttagctcttgggcttttgcaaaagcaggtgactggcctgatgtggcccataggctatagtttgccaacctctggtctagaatattaaaataaaaatcatttacaaaattaaatctcaaccgggtgagacagctcacacctgtaatcccagaacttcgggagactgaagtgggaggattgcttgagcccaggagttcaagaccagcctgggcaaaaataaaataaaaaaataaaaattacccaggtgtggtagcacatgcctgtagtcccagctaattgggaggctgagatgggatgggaggatcccttgagcctgggagttcagagctgcagtgaggtatgatggtgccagtacgttccagcctgcgtgacagaataggacctgtctctaaaaaagtaaaatcttatattttgtaagaggtaaatatcacagtgagattggtgaataaaggcaaataaagaaaatacctcttttatagaatagtgatttaacactttacagactgtgaatgagagactgtatttaagaaacaagcaacaagcaatgataagagaaaaaaggcagagaattagctgatgtgaggtttcaagtactggagagtccaagggggtcttagtgttgtgaccaattcacaaactcccttggccattccccagggagaaatattcctgatcccttttaacattatgcttttatttgcatgtatcatctttttatatgaactttgttttgcagtgttagttgataagtctcatctttgtaattgacaattgtttttatctcctgtattgtattttaaaaagtttattatgaagtgtttatattacttataaggaaataaaatagttacattgaagattgcccaggaaatacatttcattttaaaccttttcaaatagatgcattgtaatgttaagcctggccccattaatttatttcaagggatgttctctgaatgcctgaaatacgcttgactccatcaattcaccaggcgtgtctcttgatggcaattctgctttcagaccaatgagaacaccgtgatccagtttagctgccttctgaagcaattgctagttttaatataataaaaataaaacaataggatgtgtattgttctacctgtgaaactgtcatttttccactaaaattacaaaatgcaacatacaattcataaaactaaaaacttatttttaatgaaataagaagcagtttattaaggtatattatactctctgattttatgcttggtatggaacttaatgaatgtgtgtggtaagaagtaaaaatggattagttgtgtgttttttttcaaaccacttgttccacatttttaaatttcattttcttcacctaaagtagagaataaaatagtgtgttatttttccaatgtataacttggcaatttagatataactcgtaatgagggatattcctactagacaatcaaatataagaatctctttatatatgtatatgaatgcacacatgcatatatgaataagggcttatatcttttattcttcttagaggttcatggcataaaatttagaaactagagaccaacataaggagaaaataaaaggatgtgtatttttaccacccagccatagccctattgatatttgtgggactaccttccagtgtctcgtgtctgtctctatatgcgtatacacatataattatagttcagtcctttatttctcagtttatatttgttgcttgtctactatgtgccaggcacaatgtgaggcaatagggacatgacagtgaccagaaccatcccctctttccctgaagtttactttgttgggggagacaggcattaacctaaggtcactatgtgtctagtagtaatgagcactgtgaagaagattaagaccagaaaaggggacaaatttgtgtgtgtgtgtatgcatgtatgtgtgtgtgtgtaaaagtaaagacagtaatgggattgtactatccatactttttataacttgcatttttaaataaaaacaatattaatatttttatttcactaaatatacttctaagcaagtgttattttgaatgctatactctacttttctataaacgaattaagtttatttaacaagttgtctaatattgtaaacattgtttacttttaaaaattgctattttaagtattgctgtaaggaatgtcattcactgaagacacgtgtttttacacatccctagaataaattcctagtagcagaagtactgggtcaaagaatgatcatgtgaaggctcttgatgtgtgtttgatatgttttaaaatgttatatggctccttcatgactcaatttgttttccttcccctagtccccttcactcttccttccatattttaagttttaaatctaagcaaaagtagatcgtatacttcatatttaaagaactctttaacatgttaccatgataacatattactttggtagtgaattttgtgttttgtttctgaagtcagattcttattgtgagtgagagggctaatgcacttataatataattgcatcattgcacaagctaacaaagtcctattgttgcttacaaagttggtatggaatgaaggaaaaaatacattaagcacaacaaaccagcagcagccttggaaatgcaagagattcagagcaagttttaacatgtcatttcatttgctttttttttttttttttttgaggtctgaaaaaagtctaagaatactgaactgcatcacaaaggaagcattcagtcttgagagaaaaccattttagcttgccttatgatagatttttctattccagcaaaataaaataaaatgccctactttgctgtcactttccactggttttctttcagttgacattacctgtaatactaacagtcataagtcacatacttacatagcatatcctctgtgccagatactgtatttcctcattttaaagctagatgggaattactttccacaaaagagagtggacgttttaccaccaaggcactagaggtttagtagctctaacccttttcagaaatcatagacagaagtagaagggcggtgttaaagcaatgctcattgaactctaaggtgtgcacaaatcacccgagtatcttgttaaaatgcagcttcccaggcagcaggtccgggagcctgagactctgcatttctaacaaactcctagggaaagccatttctcttggttcaaggaacacgcctcacataggaggcatgaggtacttcatactgctcatcctgaaagccacctctgtgataaaataatagatgattaaaaatttcttatttttatttttatgtatcttccaagttttcatcagtgatcatatattagtcttataatgagaaaaaaagtgaataaattgattttttaagtagagtagtccctttccccagatttctatggatggttttccttgggcctctctttgaagatctttgaggtaggtctttgagtgggttgttagacacttcaggtgccctgcccatactactcaacatttaacttttaaaaaaaacggtggtaaaattatctatctatctatctatctatctatctatctatctatctatctatccatccatccatctatctaaacggagtcttgctctgtcacccaggctggagtgcagtagcacaatcttggctcactgcaactgccatctcccaggttcaagtgattctcctgcctctgcctcctgagtagctgggattacaggtgcctgccaccacacccggctactttttgtatttttttagtagagacggggttttatcatgttggccagactcgtcttgaactcctgacctcaagtgatctgcccgcctcggcctcccaaagtgctgggattacagacgtgagacaccacgcccggcccatatttttgatatgatatagtttggatgtttgtcccctccaaatctcatgttgaaatgtaatccccattgttggaggtggggcctggtgggagatgtttggatcatgggcacggatccctcatgaatggcttagcgctatcctcttggatgaggggttctttctctagtagtttacatgagatccggttgtttaaaagagtgtggtatgtcccctcttctctctctctcagtcccactctttccatgtgacaccacctgctccctcttgattgtaaacttcccgaggcccttaccagaagcttatgctggagccatgcttgtacaacctgcagaactatgagccaattaaacctttctttataaattacccaacttcaggcatttctttgtagagataccaaaatggactaacacaccatcttaaccatttttttaaattagtttttgaaatagaatctcactctgtcacccaggctggagtgcagtggcgcagtcttggctcactgcatcctctgcctcccaagttgctggaattacaggagtgtacctccatgcccagctaatttttgtatttttagtagaaacggggtttcgccttattgaccaggctggtctccaactcttgacctcaagtgatccacccactgccttggcctcctaaagtgctgggattacaggcatgagccaccgcacccagccagtcttaaccattttttaagtgaacagttaagtgacattaagtacattcacagaattgcacaaccatcattactattcatctccagaactttttcatttgcaaaactgaaactctatatccattgaacagaaacctccattcctccctcccccagctcctggcaaccaccattctattttctgtctctgcaaaattgactactctaggttccccatataagtggagtcatatagtatttatcctgttgtgtctggcttatttcacttagaatgatgtgctcaaggttcatccatatggtagtatgtgtcagaatttccttgtgttttaaggctgaatactgttccattatatgtgtataccacattttgttgatccctcatccatcaatggacacttgggttgcttccaccttttggctattgtgaataatgctggtatgaacatggatgtgcaaatctctcttcacatccctgctttggtacttagcatttttatgcccaatttccaactgcctgcatctgtgtcttcttacctgagggtgtcttctgaccacctgccgtactcacatatgggccgaaaagtcagtccccctcccaccaattaggatagaaattggtgtataactataccaggtcccttgcttctggggtggaataactggagaagtgtattcttcacatttccccgagttccccagtgggatcagaccgcagttacccttggtggtaatctgcttgatatcacattctatactggcttccttccctggttcacttttcctcagtcaccttgtgtttcctggaatatttcctcccaaataaacttcttgttctcaaatactgacttaaggtatgcctaaaggagaacacatctaagggagttaaaaaggtgcactgtgaatatctatttacacccagggatactctctttttggagagcaacagtgagatttcaatatgtgtggtggattcttagttgggggtacatctgccttcccaccccattcaagtgatgttccgaataaaattaaatctgttcatatgagcatttaaaccttgttgtaacattttatacacatgttttcaaaactctatttttgcttcgtttctaactcaacaacttattctcccaatttaattaccatacatggagctggatcccgaagaaagaagaaaaacagctctacaaacaaataggtcttttgttggataggatagttgttttctatatatagattcttgtttcttccttttgctaccatgtttagcctctggggcttctcttggttgtatctagtttgttgttcttggctcattttggcattctctgtgtattgtatttttaatattaaattatgtatttagcagcaagcttagaaacagatgaagtttcttgtactagagctgctactcaagatgaaaatgcaatgcagccgacaatgtaagtcagagctgtgcttcagtgtctttgggggtgtctggcttctagggaggtgtgaagttccattgatctttgggagctgttaatgtaggagattagtttaagtatttacacaccaaccttatttaaggcagctactgcagaaactcagtaaaccatttcaaagggaaaatgtgtgcctttctaaaaactgcagccagcttccacactccccacaccaaaaataaatcttttaattgtgtatgatgcagtagatgcatgcatacttcaaaagtctgcctagatcttcctcttctgaatttaaaagataaattactctaattgctgtgtcgtctagctggtttatagtaaatgaataactttcaacgtagaaagcagttacagctacagaaaatagacagtaatgtcactgcaagtgtttcctctttaaagtcattgaaagagtatcatagcagatgttttctgttttggactgttttcccatgaaacccatggatgacgtttgcacatgataatttatctccttaagttaggaacaaacttatctgatttcatatactggaggttggaaatcctttttgttaacttagcacagtggtaactggaaaaaataagctttttaaaaagtaggatgaattgaagttgtgatcagataagcaagaagtaatatgaagcccaagcaaagcaaacttagtcattgtttctctgtgccaacacagaccatcatattcattatgtccatcaaaataggggaggtctaatttagacagataaaatgaagtccattcttctttgtgaaaggaatcggagagtttcctgggaaaacagctcagcctctctaagcctcttgcatgtccatgggcctcatggccagcatgtaacagcatcatgtgaagttacattgcatgcttaggggtggtactaatagcataacttgactctttttttttaattcaaggagcaataactgactttctactctgggccagatctgctctgttctgaagatacctgagaatgatcagttctttctgtttagctagtaatctttcggtacatctattgccccatcaattgatttatcaaccaattgactaactgatcgatcaatctctcttccctctttctctccctttttccttccttccctccttctttccttccttccttgcttccttccttcttttcctccctccttctgaaacaaaatattaagctaaagctagagtcaggcagcttcctgaaagttgagctctgaatcttaccttgggtcctcagtaataagatattattggatctctgtgactggtaataactttacttgttgaaggaatgagattggctcctttgagtgcagttggtggttaagggcatagcctctgtatcagagtgcttctgtttggcccaggaagggactaacgtgtatggtggttgcagttttaatttgatatagattgattcatatatgtagtcactgatttttaataaatctgttggttcgtagttcaaaaagtctgggcaaaagaatctggtttacaaggaaatcctgttccaaccatggtagactgttacatttggtgaccctgctgaactctgcctcctatcactcatgcccttgtctattatattcctcattgactctagacttggccatataacttcctttggttgatgggacattagtaaaaatgatacaagcagaggcttgataatcatttgggcttgttttcttggaatgctgcttcttggaagccaaccttgatgctacataaatgtttggactagactattaagtgattggccacatcgatagagaccctgaatgatgagaggccgtctcgcatgttccagccccagtcaaactcccaactgactgcagtctattgagtgacctcagctacaccatttacaacagaagaactgcccagctgagcacagccaacttaatgaattgtgaggaataatttattgttgttttaaattactaagttttacagtagttagttacaaagcaatagataactaaaaccatgtcctactttacatggtctgtgcaaaaggacaaaggggaccttgtgtatgttgtggctcatagaagactgcatttcataatgctatagtgccattaagagcatagtcagcaagggcataatgtttgtgtgtgtgtgtgtgtgtgtgtggttgttaaattgtgagatcactgcttctacctttgcaactgaatgtcatgcagtatttttatttccacatagttatacttaaggaagctacctttaagagtaatagctcttttattcattcaggttgtgaaagacactgagaattatgaagaaaagagcagtgactccaagtcctacaacctagagtccaactttaggaagttttcatattgtaaagatggttaacataatgaaaaactatacttgattcttattcataagcctggtgaataaattagtaaattagatccagttgagagtgctgacactcttgatatccttataaaagtgcttgtaagcatggacacagatatgtggattcttctattggatttatcgtttgcgatgcccaccactgcatttcattctctacattgcaatcagattgctttttctaaacggcaaatttctgacttatttctgcctatacaatagctcctcactgcctctagggcaatggttctcaactaagggcagttttgcttctaggggcatctgacattggagacattattgactatacttgggcactactgtactatattgtagtgactaaaatagagatgctactattttctagtgagtagaagccagggatgctgctaaccatcccacaatgcccaggaccaccccccgacaacaaggaattaaccagcccaaaatgtcagtagtgcctctgttgagaaacactgctgtagggtaaggccctaactcctagctgatgcttccctttctaatttcatacctctgacctttggctcatacttgtcatgtatgcttcttatgcagcagcaaactacttcctattttgatatcttcttacctttaggtctttgcttatgttgttctcatagtctgtgggttttatcattgtgctttgtgcatacttctgtttttctgatcacactgagttgcaattacttttttttgttgttgttgagatggtctctcgctctgtcacccaggctggagtatagtggcatgatcttggctcactgcagcccccgcctcctggattcaagcaattcttttgcctcagcctcccgagtagttgggactacaggtgcacaccaccatgcccaacaaatttttgcatttttactagagtggggtttcaccttgttggccaggttggtcttgaactgctgacctctggtgatccatctaccttggcctcccaaagtgctgggattacaggtgtgagccaccacacccagtctgcaattactttttaaaatctgttgtccctacaagcttgtgagttcagggtgagctagcaccaggctacatggctaggaagtatttgatggaaagaatgaatgtttgcgtgagaccactaccggaaaaggggctgaagctgcataagtggatagctgacccaccctcagcgagctttcctcacattgggtgaatcattcccatggaggcactgtggacagcagctctccctgtgcacatgattttaatgccacttcacagtggttcttcctctgtctttttgtgttttaaacctttaggagacatcagtgtcaactccaggtgggcttcacaatactccaggtagctttgagagacaacgtaagacatgcaaagagtgtgaagacaaagctttgtgcctcaaatgtcctactgtaaagaccagggcaggggagaatttttgagaaatgaaggactggttcaaggcactgtcttttgccccaaggcggcattaacattaatttagcataatatagaccagttattctcaatcttgcctgcacatcagtatcatctgggttcctcaaaaaataccattgttggtgtccagccccaagagctattggtataattggtcttcctgagtttcagaatttttaagtttcccacatgtttctgttatgcatccaactttgaggacaactgatatagaaagtagattatagatcttcaagttaacatttccacagtaatttactattttccttcttggtaatgtactgttacttaataattttataatttttagcataagtaataaattagtacttctaacttcattcaaatttataattgcattaatttaattaatatgtaactttttggtaaatgacattgtataaccccattttttttaatatccttctccctcttggccctgaaactcagaagaaatatcatcaagaagcagctgacccgtcttcatgttggtggaagttggaaggaagccattttttagatagtgtgcccagaaagacacaaaattagaactttccttttggttcctgttctgcctcccgtttccaatacccacagttctgtttgcctaagagaaaaagtaggagcatcccccatgatcccagaaagtccttctcagaggctaattgttactttttatgttttttatttgataaccaatgttatacttgttatgaatgtgctagttaggaagaaaagtgaaagagctgtctaatttattctactcatcttccctatttggtggttggaatgaattttggcattattttaaataggaaagctagaaatcgtagttttattcattccatgacactgtatgtcaagcaccaattttttttaaagtttatgaaaatttgggatccaatgacttttgccattgagtaggtaagcactgctgtagaatggctccttttggcagaagataatagctttcaaggcaagaattataatcatttaagctgtagaattttagattactatattgtttcatttcaagagggaatgttagggtagaaagaaatggtcaaaatgatatagatagtgcaaccctcccaacttctgcacaatgtgtgtgtatatatatttatatacacacaaggtttttatttgtcaagtatacctcactagagccaaatatacaatttaactttaacgattatataatttttatttgtcaagtataccttattaacactgaaaaaacaaactaacccccaaacaaaggcaaaagaaaccagaacaatttgtacaccaaaaacaactaaggctcagagtaattattgaattcatcggttgatcattttttatggaatatcctgggtctgcctctcttggaagtgctgtgttgggtgtgaggaatgaggtggtgaaatgatttgcccatggagacatatgaagttacagcagagccagaactacaaagcacgactttgtttcttgagggtattaatttataagaaatttccaggcttgatttttctaatttccccaccttgattttttataggtatatcctataatgggttaagagggtttccaatagatgtttatgcaaggtttgtgagttttaaaatgattggttatatttatgctgtcaaacctagaaaatttgattaaaataatatctaatagccatttggttaataagttaaatctttactttctaaaatttcttttttctattgtatagaaaagcacattttgcttttcctgaattacctatgtctaagaaaatcctctgaagaatggagttgtgcgtaagtcctagtactgggacacataattcatgtcccttttactgctgtaaatttttagcaagcttttaggttggacaagaaacttagagctccccttatctaagttcatttgacagatgagaaaattgaggcctggggaggttgaattatttgatgaagtttacagagctagtctgaagccaagctggggactagaagtcaaaactttttgaccccaaggtcggtacatttttactttagtgcagagtaaaaactgtaggcagcatttcttatacacataaatgcacacacacacacaccccacacacaatatcctcacactctaaagtgagtctattttcagaagtgtgggttgttagttatgcattgtcttaggttggcttctcccaaagctggtttgagtcaaggattggagtgcaagtagctcacttgggaggtggtcctgggaagcacccgtaggggagtggaggaagtgagataaggaaggaaagtcagccagtacagtgtgtgccgataagcagattccactgtgggcaactgaggctcctctgtgctggggcccttttggagactgggtagaatatgcttccgagttgtcccacaggaaaggcaggcaaggagctgggctatttatttaccagctcctaggtcactgcttgggggcttttcctggaagccttactccttgcacttgtagctgaaaagtctacaaaagagggtttcagttcctagaggaaggctttttaagtgtggttgataactgaatcagtgggaatgtggagggattggcagatcactggcaacttctgtgtgcactcagaaagaattgcaaatgggtgtaagtgcatattctacacacagtcgattccaatatgacaaacaccttgtctttgctctttcctctttccatcatatacttactgctttcatatgggaaggatagagctgagaaataaatattgaaactgataccatcagtgttggatattctgtttgccccttgagagtcactcttcactttctccagcctactctcctgaggctgggcattaattgcaacattggtgagcttccttgccctctggctttagaatgggttcaggcagtgggagcttctagaggagactggagggaggagaactgtgaggtcagttgcttaagagactcccgggtctcttcttgccaacatgctgttggttgactctgtccccctcctagaagccacagtcgaccaggaagatctcttctgtcgttctaatactattcttggtttctgtagctctgtcctcttactccttcaggcctaggacacgtcatattccctgcatggtttccctaatccctgcccacacctggtaaataacctcttattaaactcccttgttgccccgtttgagtgttccatctgtttcctgctgggaccctgaccgaggtaacatctttgaggcatttactctctagacagaatcagatgaaatgaaacagctagagatgttatgaaggtataagataatgaggcataaatcgtactcaagccctaaggatactcagcatgtaggatccattaacaaagaagggttacttactaaagaagatgttttttggaggggtgccttaggttgtaattggtaatctgtttttctcctgctctgtgggaagctctgtttaggtagtgaattgaaaattggattctgccttattaccatgtatgcagttaattataatgtatttaactctataaaatggaaaatttgtaattcaaagaaatagaagggtgaaatggatctatccatctggaaatttcagagatttctctcatgtgtgctaattttagataagtaagtattttccccttaattccttatgtttctcatccctttaatgggttataatttatttttctcaagtttttttttttttttttaagttggtgtgaaaggcatttcaagctgcttagaataaggggctagcaacagaaaacacccattctgtatgtatttacagagggcctcttgtgattcaggcactttgcttaagtaccattaactcaataatgaatgatatttgatcattgctttcaaggaaatcacaatgtagtttggaaaatagaagcccaaacaaatacttgtgacaaatatttttaagtgttataagtatgtagagaattttacgtgcatataaatgaggatttataagtaagtctgtcaagaaaaggcagagaggttagtgaatgacagaaatgtttcatagagcaagtgacattgagttgggtcttgaaggatgataatgaacgtatcaggaagataagaggaggaatggcatgaaggaaggtgtgcatttcctggtggcttgaagattcagtgagaaatatgatttgggagaaatgttggtggcctttggagaaatgcctggacttcggccataggatagaatggtaatctgattcttaatatgcatcatcacttaaaataatatagactaaaaatattagttaaaatatactctaaaaatattaggggagtgtaaacaaaacaaaaataatatctttggggatctttagacatttagtgggaaatatattgctagatatcatatagcacatgttttaaatactgaaaaatgtatgattttaattcaggagcatctcaaaacagggagaagacccactggtatcttctgtcactacacagctttgctcagatttgtgtgcacttatactaaatttgccattacacaattaccttctatcaccatagaattacctaaaatatgaaaatatgatgggttgcttggaaatatggtggattgccttttctatttctaatgattatattagcatccatacttcacaatcacctgtttagcagaacatatctggatacaccaaccataagagatatttgtgccttattccttctaattattctagtccctaaagcttaaggggtcagcagtcttgatgttataaggtgggctaattgatgaagactgtcttatcattacaacagttatagatgcaatgaatttttgagtgctgcttactaagtaggaaactgataaacaagaattccactccagaggcatgagcaaaatggtaactatagtacatgggtattatagtcaaagcctttgtaaatggaaaccccttaaaatggtcatgttaaaggtcattatattgtctagaaacttgaggtctcatgaagtacagggagaggaacaaagtccagtcaggtatcatggaactattaatagaatgccaacgtccagaattaagcttatactccctgtcatgcagagaatgtcttcttgtctatctgttttattctttccttatcttgtttgctaaccatgttctatctatattctgttttagttatctcttgctttttaacaaaccactccaaaacttactggcttaaaacaaccaccaccatttagtgcctttcatgagtctgggtggtaactgggctcagctgggcagttcttctgtttcatgtggtgttggctggggctcaaattctctgggggttcatatgagctggaatgctcaagaggactcactcacatggttagtagttgatgtgtttattggatgggagttcagctaggatgccagctggaacatctcagttctgttccatgtagtttctttccatgtggcttgggcttctcacagtgagggagctggcttccaagagggagcttatagatgtgcaaaagtggaagttgccagttcccttaagtcaagggctcagaagtcctgggtgaccactcccagtgcattctgtcaaagcagtcacagggccagcttccaggagagaggaaatagacttgacttcccagcaggaggagtgacaaaccatttaaaaccacattttttttttgcagaaggcccaacatgttccacgtgtcaccagccaccactattcacggaaactttcataagtgttcgtcatgaattgcctatagcctctgtgtctcttagttcaaatgctcccaagggacattcatattggttgctgaccatccagtcacctgtggttgacagggccaagtcttgtgctattaaagattttctttgaaggggctgaggtgggattagtgctctgaagattatttgagagaatgctctgtgcctggccgttcctctgaggcttgagataacttttctttccatggtccagagagctctgcctgacacttgccttctaactttttctggagtaattctctccctcatttttcagctttgcttttttgttttaagtttgtctaatatgcgtctttcctttctgctctgtgtccctgagacaagaaggctgtctcctctctcccggtccctatctgtcagctaacttctaacctgctcttcagatctcagctcaaatatcacttcctgaggggagcatggaacaccctggattaagccacatcccctgtccgtctccttttccctcatcttgctatcacactttgtaaccttataccagtgtggctacttgattatgatctgcctcccactgaaggctctagaaggcagaggaatgtgtctgtcttcctcagggctgcagtggccatgcattgctcctgttaggtactgataagtgcttgctatttgcatgatttaaaaattggaagttgagatggtttggtcatttgtcccttccaaatctcaagttgaaatatgatcccgaatgttggagggggggcctggtgggaggtatttgggtcatgggagcagatcgctcatgactgtctcggtgccctccccgtagtaatgagtgagttcttgttctattaattcacgtgagagctggtggtttaaaagagcctggcatctctcttgctccctctcttcccatgtgatatgcctgctcccccttcgccttccaccatgagtaaaagcttcctgagacctcaccagaagctggtgccatgtttatacagcctgcggaaccgtgaactaagtaaaccatctttctttataaattactctgtctcaggttttcctttatagcaatgcaaaatggactaacacagaggtagttgccctgaagaagaaaggaccaaggggagagaatatttatcttgatgaaagaagttaagactagcctcgtttcagggaatataaggacatagtttattggggactgccgctcatccccattggtgataccatgtgaatcagtgaagtcctattgttaagggtagaggctgcatgttagtttgaaatgtagcaagagttcctgcccagagatggtccataagtgcctgattaaaagccaactttttcttttctttatgcttctaccaccatggggccctaaatctgtactcagagatctcagtgatggctgaactttgtgaccattgggccagaactactcattccattcctatttgttctcccatgaagccagtatcttgtttggctgcaagccaaaaagattggttagattacagcttgggatatgacggatgcacctctgagcataatctccatgagataaccctaaccaaaactttttgtccagttcttctgtggcatgctatttatctaaaaagaaagttagtaagttagtaaaagaatcaaaatgccagatgggaaacataaagatggagaaggaaataactgagattttgttttatttaaagattctacactctttgcatgctaggatttttcaatccccacttttagattgagataaagatgggggcaatcttgtttaagttcacttaatttccctgaaataatttaatgctgtaaatatgtactgaacactccatatgtatctccgtggagggtgtaaagacacatacaagttggtatataatcttgaaatttatacctacccaggaattatggcatgcgtatatgacatgaggtcccagtgcaacaatcagataagaagggaataataggaattaaatgggggatggagtagtcaggagtgtttttatagaaaggctagacattgagctgaatctccatggatgagtagatttaggaaaagttgcctagaaagtagagggagagggcattctaggctgtgaaagccccatgtctgaaagttaaagtgtgagaaggagcaggaatgccctttcacacaccaaaggcagtgaaggtatacagggtaggggtgggaggttagggagtggagggctatggcaagccactgagtgagatccttggaggccaggtgcagaggtggaatgcttgcaagcagaggaagtcatatcataaaacctgtgatttggaacattatttcctttgcagttggtgaggtagttttgatgaggaagaggctggagccagagacacctcctgggagatgttgtggtcagcaccacaagggtggtgatagaaattaagagagagggaagtgcacaaaatgggttcagaggaagaatgggtggattttcatgtctggattcatagtgaggaatacaaagaaggaagaaataaagggatcttgaatctgggaaaattatttccatgatcaccagtacaaagattggaaatggatggtcacgccaaggttgtgtggaccagaggaatggaatagcttataagcaatgttaaataactgtgggttggttgaaagataaaggctggaggtgcaaatgagtgcatcattagatgctgttggattaaataaatccaatgaacacaaacttgggagttttactaggcattttaagcagggaagtgaaaaaagaatgtcccatatcttcagatactgacatctaattcaacagtaaattatgttgttctacattcacaacatatcccaaatttaagcagtttgtattgctggtatcactaccttctggtccagtcatcacccttcttcacctggattctgcagtagccttggagcttgtctgttcctgcttgagcccttgcccatctgcagtctgttctcaacacagcagcccaaatgatgctctgaaatagatatcagatcacgttgccctgctcctagtctaaatggtttcccacctcattcagagagtaagccaaagcactcacaagggccccaagggcctggcacgatcccttcctcttaatctctgacttcatctgttactaccttctcctttgttcactccatgttggcttaccttgccaactgcttttccttacacacactgggcatggctgccccagggcctttgcacgttctccctctgcctggaaacttctttacaatatctgcaggacttgttcctcacctccttcaaatctttgccaattggggcctttcttttagtgttgccatccctgtgacttgtacctgtccctttccttactttagtctttttcctccataacctttagtgtcttctaatatctagaccattggctgactcgtttgttgtccatctccctctttaaaattgaagttccatgacagcagagatttctgtctgtatcatgcatggacatcttcaatgcctagaacagtgcaggtacttagtagtaaacatttgttgagtgaatgaaacaaatgctgttagaaacttctttttgagtggaattttgatttccttgagatcagctgtcaataatttctatctttatattcaggcatagtcagtgctcagtaaatgttgaataagcaaatagaacctgaaatataaaatcctaacatttcacattagctagttccagaaagtttcagtactaaatgtaacatttaaaaaacggtggaggggagggatggtggaaggatagttttggtgcatttagcttagcctccactttcgacttcagaattcacattgcagtttggcaattctttcattattactatgattattaattggatgctatttaaaaatttggcttttaaactctcagctgatgttttaggagattatactatacagggtacagaaattgctggggctgactgtaactattcatggccaattaaggaacagcattggcaagaaatgcagggtggatacacttgtgctttgtgggaatcctggtggctatggcttcatagtatcaggggactagcttgctgggcttccttctgcaaaagggatcttaatttggttacctggtggatgcttttataaatgagaagaataaacagtcttgagggacttaactttgttggagagttaaagggagaaagaaaagaacaaagtgaagaaattactctttatttgggagcatttccttgagaagtctttctgaagtttgcttttagttttatttggtatcacttttatcttttcccaggggatgcagatgtgttttgaaataacgcatgcagaaaaaacaagctgtaggaggcagaaataaattcttgaaagtttagtaagtttctgaaggacagaactgcttggagaagctgggctgtaccacatctttaaggttgatgtctgggagaaccaactactgtgtttcctggtatgaccattgatgtgtttgttgatagatacaactaatggctaggttcttgcttgtacttttatgtgggactttttaaaagagttcaaacaatagggaaatatgacacaaaggaacctgaaaaacataagcagcagattacacctttgcttaactttaaggttaaaacaatccatagaaaattgttttggatttttctagctagtgaaaatactatacagccctttgcagatatagtatctaaggggtttaaagaaagttaaaggctggtgtggtggctcaggagtccaaggctggaggattgcttaagcccaggagttcaagaccagcttgagcaacaaaatgagacctaatctctacaaaagaaaaaaagaaaagaagaagaagaaagaaggaggaggaggagggggaaggagggggaggaggggaaggaggggaagaaggggaagaaggggaaggaggggaaggaggggaaggaggggaaggaggggaaggaggggaatgagggggaggaggggtaggaggagaaggagaaggaagttcaaataaaattaagtcccagagaacaaggccatacacatacgcagccaaaagatcattcatgtaacattgcctaagacttctccatggtgtcagttaggaggatgtttaaaatcagtggcagagctattttcctagctctgcctaaaagtgccggaggtatattgtgttttcagtctgggatccaaagccatgtgagaagaaacatcagagatgaaggcttttttggttttaaaccatcttagctgtgtttgcactcatttctgtcctcattaaagaggacaactggggtaactgagatagtgaaatgtatccaaggtgaaagtgagtgaaaacaaaaatatttctccagtatgtttttgtgatgagaagcaggaaatctgaaccactgagctcttaagaaagtccttcactgcacctttgtttcctgtgtcaaagaggccacattcattacatagcacaattcttggagtgaatccttcactctcaacaaatgagttaaaatgtttttctctaaaaaataaaagatgcatcttcagcaaattttatttttattaggaaaagccactactgcatcctacttttattctgggtgtgttttatatttttgacaagtgctctcacatcaaaaaaatgtgtctacattaattcaaaattcataatgatcactcttatcctgctgatacaattatcaaagttcttttttttttttggtcttctttcccctgctgttgcctagtgtttgtaattatcttttcttgaggttgggcaggggagaggatagggagagaatgttcagcaaaaatcagtcatatatttagtgtggcttcccattcgttcatttcatcttccatctatccatttatctttccattcacgcacccaaccatgcaatattcattgatcatctgtgagccacctaaattggaatagcaaggatctctcctatcaaagagtctagaataaatgccaggcatttacagtgggaaaatgttaatatcaggtaaattctgtcttggggagaggtcttgtgacctgtttttgggggttttagggaaagcttccaggaagcagtactgtctcaactgatacataaagggcaaattgaagttagctggaagaactgcatgtttgggctagagtgtggttaagcaatgaggaagaatttccagcagaagaaactccatgttctagaggtcatattttatgtgagggttgtatttctaaagttcttgcaaatttggaactcccatgattcaaaataattctgtcaaaagatggtggatattttcatttaccagctaacatggccctgtggccactctgtaaacagagtttagagtttcctctgccccagccagcatcaaaactacaattcttgaagaattgtttcggtgggggtgcctacatagatccaaattaatgtgagacaatattagtgcttttgtatcaccttatttcaaagctgcatgattcaggttcacctcaaatatgaccaaactctggagtttcagagcagtagctcatggcccatttgatggtattaaaagtagatcaggatggatagcatgtacacacaagactaggggtgagggagaaaggagataaaatggataaggaatcagggaccaggtcagtgaaggcttgtaaactgtgttaaaaggtaaaatagtcacattaacattttaaagaatttattcgtgtagatagtaattcatgaattgggcagcatcaggtagtaagtggttcagggctccgctgaaagggcacaaggggaacatttttataaggtgttctaggaagcaagacaaaagtatttggttaaagtggaaagtccctagttagaggttaattggtagtttctgactctttacatggtattttgactcacattgattaggttttggtttacttacttaggaacccaaggtgccggagccatctcagcctgatggcttctcagttagtttttaaaagcaattataataagaggatggcaatggggagcctctgaagaatgctgaggaaggaattggcgaggtcagcattatgcttttgtttaagtgtaaatagaagagagctgaaattagaccatatgtggatttcagatatttttggaacatttatcttttatttcttattaaactttgcttataaacaatgtaagcttttgtgatatcaaagtcctcctcttaaggtgttttgttaatttgcttttgaagagtccactaatcatcttgtgagagaaaataaaagacgtggcctgattggcaaaaagattggatagaggttcaacccagaattggggtctaaggctaggggagaatccgattagggaatcatacttggaggtctatggtaaaataggttgtgggaaatatgggttagacaaagttaaatagacttctttattgtggggcttctagatccttaaagacattaatgtatgttaaggtgcataggatgtcatcaacttgtttcacaactaaggaacctttgttccaaaagtagtcattacagtctggctaaggactagtattccaaggaatatgtatccgtttccttttgccacaataatgctgcataataagcaaccacaaaactgcagtggaatagaataacatatatgtatttagcctgtaagtttcggggggttcagctgctcaatgcttgactgatttcagctgatctcattcatgtgtctgtgctcagctatgggttgggcaggcagcgctgggttagttcatatgtctaggggctcagctagctgttagctgacctagggtggcatagctaacatctatgctagatcagggtgactcatccctgctaaatatgtgtctcatcctaagatactagacctagcatatactcctggctatggcagaggagcaagaatgagaacaaactcagttgtgcaagcacttttcaagcctttctttgcatcatgtgtgctaatatttccattggccaaaggaagtcacacagccaattctagagtgagaatggcaccacaaagttacgtagccgagactgtggttacagggagggagaattgtgctctttttgcagtcagactatcctagatcccaacttagaaattgcaggatgagattacagtcaattgagcaaggaatgaggtcagacttttctccatgccatggccacaggactgtacttttgatactgataagcagcctcacaaatagatgtctgagccatgtcaaggaagagagagttcatctgggtctgcacaggtctttattgtttttctatggaattatttcattgaaggctgaaaggattgtggacatcatctagttctagttgcatcgtgttggcagtcgtgaaggagacagtcccagagaggttaattgggctccttcaatccaaacagctatctagaagcaaatctgggccttgaacccagattctcaagccaattgagttttaattacctcaaagaagctttgttgtggggtggaagggactgaaatgtatttgcaatctttatataggaacaaatcacattcctcctggaggaaatgaaatataaatgatttttgaaataggaagaatagagagtagtcatgccttgttagatgtctcacaaagggcaaagggtaaggatagttaagcattgagtgattactgaaatactgtggctggagatccttggtaatagagtttcgttttcagatttttttttctcctgtctcttccctcgccccaagaatttctcctgcatcagggaagtcaacagaggacttctgagcggagagtaagaatttgtgttctagctccttctttatcaaacagaagatacaattgtgaaggcagacccagccttctagaatagctggcacattaacacctaacttacctgacattggtagggaacaatctgtgctacataagtaaaattttgataatgaaatcctaaccatttagcactgtcaaagtagctgttttcgtgatggaaatatttctggtccaacagatgtgtttccctgatttaataaacagaataattgaaacttccagcctcatccttttagacatcagttattgaactgtgcagtaatatagaaacatgccttgtaaagagccatgtaagtgtaaggtgttgttattgtttgcttgggtttctggagtatgtgggccacttggctttagacagatctgctttctaaattcttgtattccttgtttgttttcagagggttcccttgccctctggcctccaggtaggtgtagccaacaggaagcactggtggaaaactggagggccagaagagagagaggtcagggtgcctttctctgcctctctgctttctttggtatctctaggaacacatgtgtctcttccatgtgtctcttccaatcagctctcaccagactccccttttctccacagcagcctgatctccacggctgttgccctggtctctgtcagttggctctagcctctaggctctgataacgtcacatccttccattatcccacctgttagggaagatagcagctctcctcagttgctagtctctgggctgcttcactgtccctctgtggtctgtcagtcattctcacatctgtaacaagtcacctgatttgaaagacctagagtagtttctgtgttctggttgactttgactaataacgatttattgaatttgccttctcttgcaacccttacttccctcctgatttgcttcttgcaacgtactgtgcaggtgacatccacgttatgcagtttatttcattggacataacaatggaaactcttttaagcaatagagcacagtggttttgagcctgcgctctggtgttagaatgtttgcatcgtagtcctggctatgctactcattggctatgtgactctgggcaagtttcttaacctgagactgactttttaatctaaaaaaatgaaagtaatttcagtacctaagttgtctcaatatgagtttcctgggaaacaaactcccaactggaggttggtgtgcagaggtttgtttattctcaaatactcttcagattaacatctgtggaggggaaaggacggattcaggactgggcagagggagaagttgaactgcagtgcaatcttaacaagagccttagttaaccctctgaagcaggttgggcgcttattcactgatgttgaccattggaggcagttgaccgtgaatggaacagcttcctccagctgagggaattttccagagaggactgacagttgagggcattctgcctgcatcactcatagtagcaaggaatcaattcttcagtcctgaagcagtgtctgggcgtcacatcacagtgtccatgacctatatccaggtgtgtaatgtgaaagataaatacagtgattaaaccataagaaatgccttgctaggtgcgtaccacttggtgaatgctcaacactattagttaacattattgatgaattaaatacagaagtttcagttagtggactttatgatgtctagtgtagctattctgagagttttgactgatttcttctccataacccagtcctaaagagttgaggaaaagcagagtaagtggtctgggataaatagggttccatgatttgtatacatatactgtcatgcacatttgtactttcctatgacttttaatgtggtgtctttaaatatggcttacccataggttcttgtatctttattccttaaggtattcaaggtatttagcatcaaatttggtacaaatcaatgcagcttccattttttgaatacttactatgtagccatggtgctaaacatgcatcgtctcgtcagttctcaggatgactctaaggtgctgagattcctagtttagaaggaggcctgaggtcagtgaagttaagtgacctgccccaggtcacccagccaagaagtggcagagaagttctcctgccagggctgccagattcactgcgagcctaggcttttcactacacatttggacgatttaagcagcagtaggggaaaccttctcctccgaaaataactctagcaaagtgtaggtgttgttttggtagaaacatttcagctgttgccataaaaatcttcccccaaatggctttgtgagagcaaagctgtgcaggctctgcttgtgtttatgatgggagccttatggctcagccacaacacaaatgatttgtttttctggccttgttggcaaagtgatttaatttctgggtttccctgaggaaacaatctaaacaaatacagtaggccctccatatctgccagttctgcatccatggattcaactaagctcggatagaaaatattcaaaaaatttaacaatacaacaataaaaatagtataaataaaaacagcataacaaatatttatgtagcatttacattgtattgggtattataagtactccagtgatggtttcaagtatatgggagaacgtgcataggttatatacaaatattatgccattttatataagggacttgagcatctgtgagttttggtacctgtgggggatcctggaaccattcccttacagatactgagggatggctgatatggtttggctatgtccccatccaaatctcaactaaattttatcacccagaattcccacatgtggtgggagggacccagggggaggtaattaaatcatgggggttggtctttgctgtgttattctcatggtagtgaataagtctcatgaaatctgatgggtttatcaggggtttccacttttgcttcttcctcattttctcttgctgctgccatgttagaagtgcctttcagcctcccgccatgattctgaggcctccccagccatgtggaactgtaagtccaattaaacctttttttcttcccggtcttggatatgtctttatcagcagtgtgaaaacaaactaatacagtaaattggtaccagtagagtggggcgttgctgaaaagatacccgaaaatatggaagtgactttggaactgggtaacaggcagagattggaacagtttgaagggctcagaagaagataggaaaatgtgggaaagtttggaacttcctagagacttgttgaatggctttgcccaaaatgctgatagtgatatagacaataaaatccaggctgaggtgatctcagttggagatgaggaacttgttgggaactggagcaaaggtgactcttattatgttttggcaaagagaatggcagcattttgcccctgccttagagatctgtggaactttaaacttgagagagataatatacggtatctggtggaagaaatttccaagcagctcagcattcaagaggtgacttggatgctgttaaaggctttcagttttataagggaagcagagcataaaagtttggaaaatttgcaaactgactgtgacagaaaagaaaaacccattttctggggagaaattcaagctggctacagaaatttgcataagtagcaaggagcctaatgttaatccccaagaccatggagaaaatgtctccaggccatatcagagaccttcacagcagcccttcccatcacagacccagaggtctaggaggaaaaaatgatttcatgggccgggcccagtgtccctgtgtggtgtacagcctagggacatagtgccttgtgtccaagctgctccagccatggctgaaaggggctaacatagagcttgggctgtggcttcaaagtgtagaagccctaagccttggcagcttccatgttgtgttgagcctgtgggtgcacagaagtcaagcactgaggtttgggaaacttcacctagatttcagaagatgtacggaaatgcctgtatgcccaggcaaaagtttgctgcaggggcggggaacttcatggagaacttctgctagggcatcgtggaagggaatggggtcagagtcctcacacagataccctactggggcactgcctagtggagttgtgggaagaaggccactatcctccagaccccaaaatggtagacctactgacagcttgcaccatgtgcctggaaaagctgcaaacaaacactcaatgccagcccatgaaagcatctgggagggaggctgtaccctgcaaagccgtaggggtggagctgcccaagaccatgggaacatatctcttgtatcaatgtgacctgggtgtgagacctggagtcaaaggagatcattttggagctttaacatttgacagctctgctggatttcagacttgtatcggccctgtaaccccttcgttttggccaatgcctcctatttggaacagctgtatttacccaatacttgtaccctcactatctaggaagtaactagcttgcttttgattttacaggctcataggcagaagtgacttgccttatctcagatgagactttgaactgtggactttgggttgatgctgaaatgagttaagactttggggggctgttgggaaggcatgattgggtttgaaatgtaaggacatgtgatttggaggggccaagggtggaatgattttgtttgcctgtgtccccatccaaaactcaacttgaattgtgtctcccagaattcccatgtcttgtgggagtgtcccagggggaggtaattaaatcatgggggttggtctttgccgtgttattctcttgatagtgaatacatcttgagatctgatgggtttatcaggggttcccactcttgcttcttcctcattttctcttgctgctgccatgtaagaagtgcctttcaacctcccgccatgattctgaggcctccctaaccatgtggaactgtaagtccaattaaacctttttttcttcccggtctcggatatgtctttatcatcagcatgaaaacaaactaatacaatggctttaaatttatttgtaattggatgtttaaagaggagccacaagggaaagtcaaagtgggtggcccaggtacgttttcattcagtgagtgatacgataaggggaggaataaggtgcataggtgaattcactcagtgttctttcttcctagtatttggctctccattcttcatcaggaaatgattattataatcaaccaaaattttgcaaacaaggtgggcatttaggtatgtaggtgttcagcattatttttggagaacagagcaaatccggtcattatttctttttattgaaataaaagtaatgactccttttctgtaggaaaaagtaatttttcaaaataggctacatggtactgatgagaagttaggaagctgcatgatattccagtcagatcaggatcccagactcccatctttctggtccactatcttgatctttccattttccattggtcacttgggcaaagttcggtttaggccatcaggtccacagtgcacatgtgcagcgaggagggattagagagaagaaaggaatccttttagttgaggcatctcctgccatttttgtcatcttactcttaagttccatataacactttaaaaaaatttttcttgaccaatatttggtcacatggtcacatctcagtgcaggagagcctgggaaatgtagtcttgttttgggcaactgcctgaataaaattggggctctcttactgatgatggagaggagaatgactattgagttataactggcaatttctgctacatttgggattggaatactaatgccacaaccaaaagttttgaaatgatggagttaacattaaaaggtgaattttgttggtgtgtgtttctctaataatgctcagtcgtctgtggctggtgtgcataatgaacatacacagctcctaaatctgcttcactctggccccctttcctgggggaaacagtgtttggagaagcacactttatgtcattcaacagatattgatcagctaccatataccatgcactgtaccagatcttagcagagtctaggagctacaacattttccacatttatttgaccacctctcccacaaccctctccctccctccctcctttcctttccctccctcctttcctttccctccctcctttcctttccctctttcctttcctttcttttcctttcctttcctttccctcccttctttccttcctttttccctccctctctccctcccttccttccttctttccttccctccttccctccttccctccttccttccttccttccttccttccttccttccttccttccttccttccttccttccttctgcttttggggtacaagtggtttttggttacatggatgaattatgtagtggtgaattctgagattttagtgcacctatcacacaagcagtgtacattgtacttaataggtagttttttgcccctggcccccctcccacccttccccttctgagtctgtaaagtccattatatcactctctatgcctttgcttacttatagcttagctccctcttataagtgagaacatgtggtttttgattttccactcctgtgttacttgatttagaataatgtctccagcgccatccaagttgctgcaaaagacattattttgttccttttaatggctgaatagtattccatggtgtatatgtaccacattttctttatccattcattagttgatgggcacttaggttggttccacatctttgcaattgtgaattgtgaagactcaattctttgttgaaaagagctgcaaagtcactttacaaagggtgtggaaagctgaagaacttgagattcagggcctttttagctgtcaatctactgcagtgtcccagggaggaaaagcttaatttgtatggatgcttgattctttctgtaccttttctttctctgtttccacaaactcacccagttaaaatttctgttcattgaacacgatggcagctaggttgatgggattaaatcagttgtctttacctgcctcagtgtgttgggatcctcaaagctcagtgaaaccaccagctggtgaataagacttctgagtgggtgggtttcctgatctcacttgatgttttttgggacaatagtgatgccccatttcctttgtgctctgtagctaaactcccagggagtaagacatgtggcataaacataacctcatagactatacctacatcgtgcccactttagctctttctcacttttttttgtgtgtgcctccagaacacacaagacaagtaaatacagtatggacaataagttacgagtgaggagagagtgttttgagacagccaatagcaaacatcgtggagaacttctctttataggtcaatatccgttgtcttagtctgttaaattcttccagtcatagactgtgcaatgtatgcataagctatcaacacttaaaaaattatgatggtcactaagaagaccttttttctgtacactttcagtgcttcttcagtcatctgccatgggtacttctgttcttcatctccagattgtttctggaagtcctgtgggcagctctttaacactggaaacatgcagtctcctcatccataaaatgggcaatacctctctcaatgtattcgagaagtcacgtacaggtcacatatgaccattactcataatatgtaacactgacatggcactaactatgtgctaggtacagttctcaacaggcttatgaggtaagtgttattacagtcccattctgagatgatggaattgaggcacagaaaggttaagtaacatgccagtgttgcacagacctgaggtttgcacccaggtagcctagcactgcagacctgtttcatattcatgctgaaggactaactgcctctgtaggtgtgagtactgtacatggaaaagttagagaagtaaaggtctaattttgacagaattgagaggggagggggcattgacttaggttttagaaattaacttagactcttagtacataggttgctgtggcaatttacatagctatttctttcaggtacatttgacattcaaaagcaatcagatcgtattatctgttctttgagggattactgggctctgtgaatcttgaaggttacatttgcaatcagcattaattttattgttaaccattttccttcatgttggttacagggttgcctccctccctccctccctccctccctccctcccttccttccttccttccttccttccttctttccctctttgggctttagtggagcttataactagttgaactagatggatcaactcaagttgattattcaggaggccttattatcccccagagagcagacacggagcttggctggacctcacggatcactagtccatgtcactgcacaatgttcttcctctgttcttcgctattttagtccaaaatgcctgctaaatggagtggagtgaagaaggcacacaatgttaatatgaagtaacttccccagtgcattttctgattcatcaagatgctcacattaagctacatgaacaaatggaggaattcccctggaagccaaggacagagaaaaatcatatgaaaaaaaaaaaaagataaataagagataccaacttgccttttatattcaagcagattttcaaaaagtctcattgcatggaaagtggctataatttaaacaaaaagtcatttactgtgctaacattcatgaagatagcaattcttgggatgctgcatgaattgggcagaatgttaaaatgctgaaggaaccttgtgtctggtttaaatacattttggttggtgtcatataggtaaggaatggcagcctcatttttaactcttagtaattaaaaattggaacctttaagtagggagagaaggaaactatagtgtggaattcaagatagtgcacttgattttctcattcctggggagtcacatgggtttatgagactcctcaattgtttgacatttcatttaaaaaataaaacaacaaaatgagctttccctttcatctatacaagagtccatgaagaagcctccttctcttatgttgtaattcacagaccaaagagttgagtttgagtatataattactcatctagatatatttacaaaatactagtaattttactggtagtagctcatttatgctgggtgtgatggtgcgtggtcctagctatttgggagactgtggctaaggagcctcctgagcccaagagtttgaggctgcagtgagctgtgatcatgccatttcactctagcctgggcaacagagtgagaccctatctcaaacaagcaaaactaatttatgttgaattcttcctatatgtcagctagcctttcggccctttacctgttccaccatttatcttcacgataaccctttgaagtaggtactatccttgtctccattttacagatgagggaaccaaggcacaaggattctaagtaatttgcccaaagtcacacggcaaggaagtttcaaagctaggattcaaacccaggctattataatcactacactacaagtattttcaaacagtgtttcccaatatcagtcatacagataccatctgcatgctttttgccatagttgtattttacttctattattatttaatgtttctcactttttttttttgagacagagtcttgctctgttgcccaagctgtagtgtggtgacatgatctcagctcactgtagcctccaccttccgggttcaagtgatcctcctccatcagcctcccaagtagctgagactatgggcaagtgtctccacacctggctaattttttttttttttttaatagatttgggattttaccatgctggccaggcctgtctcaaactcctgacctcatgtaatccaccctccttggcctcccaaagtgctgggattacaggcgtgagccactgcacctggccactctcacgtttttttttttttttaaccgtacaaaacagtatttaaaagagaaaccttacacctctatcttaaatggaaaactattatgtgtgcaaatagtagatacccaataaaaactaaacagtgaaaaccatttagtgttattcaatcctaagtagatgccactggctgccaaaaaccctgcgtcagaggacgtcctttctttattgagacagagagattttaaaggcatgctctatagggttgagactatttgatgcaatcagttcagagtcagggattaaatttttctactaggagagtctgtcttattccatactgaatttgtaaatcatctaaaatcaccttgtagtttattagtgttaatggctcctacactctgagaatcacttgtctaaaatacaaagatgttgtactgtttttagaattatcttagggaaagtgaagcagaaagatgtttaaatgaattcaggcctgtattattaagccaatccaagtaaagctattatctgaatgattagccctaaagtcccttaccactttatctggtctctagaaggccagtttaggttgctttgtgggaagatgtatgggtgatttttatccaagttattatctaagaaggtgtggttactcctgaattttaaatcagactacttagaaaatggccttaaattgatcctttttttatccttgacagatacttattggttgaaacatcagagagctttaagctttctcaagtacatgttggagaccattgggactagtgtccctttgttaccaagaggacagtgtatgatatgcatgattaacataggattattatatattgattatagtgcaaaaagtaaaaggtgtcttttcatctttgagtttaaaataaagagatttagcatgtttttgtgtgataagagggatcttcttaattcccaagacctctttaaaagcaattcatgaacatacttaagactcatcagttgaacaataagttaatctgcatctgaaggttttgctgattatctgatcatataatttccctgtattctgattatgtttttctgatgccttttacagtatatgaattcttaatcaagatgattccgttagcagtagctcctctatacacagtgagcccaggagggcagagagcttggcttgatgaaagtttttacagacataaagatggtgaatgaaactggcttcatcttgctcagtatctattttgaaatattatatttaaatattaaacactaatattaaatattatggttccaaagtcatagcaagatattaactgtggcttgcatggatggtgaaattattacaatggtcttttaccgttcagtgtgctcgtgaacttcagaaggcttctgatagattttaggcctgtttagttgcccatagttagggagaagaggtggccatactacaggaagacaagctgaacgtccctccacactaaagctgccacaggacctgtgtcgccaaggagctgctgctcagttctagccaggacagcagggtgagctggatccaactccgtttggtggcataatagagagcacctttatgtgcaggtttcatctgttgagtagagaattgtggctgggagtgtggggggtgggtctctaacatttgctgtggcttatttagatgtagcccttaattgtcctgccctgccctgggctaggttttggaaaccagagctcgttagaagtgtgtcctggcttggggaaaagatgaaagaagtccaggatagttaggtcctcaaggaagtggaccatgtctgtttattcatccgtatatacctggcacctgacacagcgccgggagcatggtgggcactcagtagatacgtgttgagtaaatgaacgcacagagttaaattgggcagctgatgtttttggtattttataatttttgcttggtgacaggaaaccacaacaaaatatgtgcctgtgtgtgtgcatgcatgttttatagcttcctgaagaaatagaatcaatttcagtttttgcaactaaaaaagaatgcagaaagtgagcttggagtgaggagctgctttcttataatgacaaagaatagttacaagctgttttctagaccgaggtaatggtggaggtaacttctgctcctttgttctgtgtatctttgtgagaagggagagcctgcaagggcatagaaaagggagaagccttgtggaaaacagagaggtttcttctggacttcgggtttggaggattagcagaacatactagaaaataaggttctttctcttgggaaattactcatgctggcagcctgaaatagcatgaaaaggacttttattagtggcaggtcttcagatagtttgctagagaggagaagtgcttccaagttgagtgaaagcagaaagcgagccagagttgcattagcaagtgattcaaacaatgaaatctcaagcagcaaggcagctgacatctcagcacttactctgtgctgacagataaatataaattatttttgagacagtggttatttgagatatgtaaaagtttttagatagatatcattatcccaattttacaaatcaggaaacaagtttataaggtttgtaattagtccaatgccccataaacagctggtacataatggggctagggtttgaacgcagcttatttgatttgaaaacctaggttctttccacatgttaagtaatcccttgcctttttgagaactgcattttatagttagcatttatcctaagtggttcatggtttttactaattttaaagggaaagttctagttttatagggaagataacgttggcttgtgaactcagtgagaagatggacagtagagaggttaacttgtccaaaatcaaatcgctctgatgccaacccaggtttgttggagtgcaatccgctgctcttacctaccatgttgtgctgtctggctgattttaccacccaggagctgttgattaccagtgtttggttaatcataggaaagtctggcttgcagccattgccagtgcacaaatcatgttctgtgaaataaattttattttattgactcgaagagacaaaagtgaagctatgtcttctgaataatacccagcattgcttgtattggactttgtatattttttttcttggagtagaataaagtatgtagacaaaataacttatgaagcatttttattgttctgtggattctgttctaacttgaaaggtaactgctttttcactttttagattctacaaaaaagagtgtttgttacctggtgaatcaaaacagaggttccattctgtgatacgaaaagataattattaataaactaaaattaaataacactaatactattggcagaatacattaatgccgataatcactgatactataatagatgttcaatgcagccagcatgaagagctggaggaacattgatgagaattttaattcatatgatatttaagtttatatcctttatttctttagcatgttctgttttttttgtcaaatcttttagtttcacgattcattagagtggatgacccaggcagatggaattggcagtgtttattagaatgtcataccctgctttaaaataatgttctctgctaatttgtcccttgttccctgaaacaatgagttgactttaccctgagcatcctgggttgtcagctttaaagtcaatcttttgcaaggttgaaaggatcaagggcattattacataattgttttgtctttaatccatagacttttggaggaaaaggaagcaaaatgtggcgatttgtgtatgttttgggtattgggcaagaggaaagagagaagcagaggtatacctgtacctaaaaagttttcttaactgtcacgtcatggtgaattaatatgttggtgctttcttaaactcctcagtaatgagagtcaaaaaacagattcaatatgctattcggagttaatatgggaaaagatgctgtatatttatattaaagggaattggaaaggatggtatttgctctggaaacacagccttcgttcatgtttactagtcctatagtagttacgttcatcaattatgttttgtttcctagaatgtacaacatcctccatgtttttttctttctataatttacatttatattgtgtttttccttttttgtggtaataaactattgtaaatgtgaataataaatatattataccagtgcctcttgtggaggtgcaatattagctcatttaaaaaaaagcctaaaagccttatcttgttctcagtaaaaatgtttatagtcttactttacatattgttctgaaaagctgttttttaaaatgtacagacctttccgggggtatgctggtatacatttaaccactggtggggtggaggtgatttgtatttttaccaatttctggggtttaaatattcttaccatggccaattttaagctagcagttcagcatcactgaacctggggatgggaatagatgcacacagttgtcttttgcaggccttggaagctggctcagccactgattttagtaccaagagattggaaggggagcagtggctagaaggggtagtggagaggcagaaaactaaagaatgtagaaaataataagaaactaactaaattgggagatgggtttctgttaaaggaacttgagtaaacatgtcgactctgttttctgaaactgccgggatgaaaaaaataactaaaagtggggggaaatttttcactaaaagtagagaatggctaaaccccaaatgttaagcctctgaagaatatctgccaaatttggagcaaatctgagcagagtcaaaatatgtgtctcttagagccccagcaggtggattttttgcaaggtcatggccaaaatccctaattgggaacagagaggttgaagccctaggcgggttcctggagaagcagaacttgttcctcttttgatgttttgtttcgtagattatacagtatcctccatgttttttttttcctttctataatttatgtttatattctgttttttcttttttgtggtaataaatttttgtaaatgggaataataaaatattatgcttatagatttattcactttagacagtatctgttgagtcctaaatatgaaaaatttaaaacgtgaacattcatattttcttccatttttccaatctcttgatcatgctatttattattttttacatgatcatgatttatcacatttttattacattctatataccgtaatttgcctccatttcatatttaaataaattacattgcaaacatcagaacaaaagaaaatatcaaaccaggaagcataataaattgaaataatagaattaagatgaaccacctgcttattagaaatcataatgtaaacgagataagttcatttattgaaaggaaactattttgcgtgagtcatccaaaaaagtgattataggcaaacttaaaagtaagcagtggttataattaatacaaaagatgaagggtatttttacttttaactttattccttctgtggtctgaactttttcaataaacttgttttactttaccaattaatttttaaaacatcccagactgtagccattgattataatgagacacagctgcatcgttttcatattaaacagtgactgtttcactgcctgttttttgtcacatggcaggccttcagtaaatggtggctgaaagaacattttctcaagatgttatagtgttattatgatgtgtatctaatagttgccccaatctttggagtcttttttttttatttgcatgcacccttgtgagggaagtgattttattgctgttttacagatgaagaaactggggctcagggaaattaagtgacttgcccaacatcaaaccatctcatgtcttctgaatcattttttaagtaaaatatttttctcatcatatgacagtctcttaaatacaatattttagttatgattctgttgactgattagaatctatataaactgaagacattttaaaattatattaaatattttcttattagaagcattagaagagtataactcagtttagaaagatttcaatctttcaggggcatgattgggaaaaataacttgtgtgaagtagtttgttctttagtagtcaagtggatgaatatatgcagtgttgacttaattatctttgtggagtagctgtgaaccaccagtctattctgtggttctatcctgaaaactgtcttttcaatataaataagagcaatagactgtcaggagatttctggggaggtggagggaactgcaggatgctaggacttgagactgatggaaacgtttgaggtagagtcaggttttacacgtggtttgctggaggtgccatgactcagtttcttcctcttgagtctgcctgtgtaaaagtggttgaaatgtgcacatatgcatgcaaacactattgcatttgggtggtgttttttatggttacttctagcctgcatcagcattttggcttgggtgcccactctgtatgatatattggctgaatgttcatctctgaggtctgacagtcggcttttgagagcaaatggatggccacagtacaggcacgtgcccgctatagcaactgccaaggttcaaaacaaaaagtccagcttctcgagggcacaaaacatgctgtttcttatatgttctagtgtaatgcaaagcatatactaaatatccactaaatacctgtagggtgtgcttccattcgctatactttcatttgggaaagctttataatagtgtgaaatctagtactgatcacactgtaatttttagagatagtagtacaagttgggacagatggggagcctaataatttaatgattttaccaagtgcgttgaaaacttgtcacaatatcagcttggtggattaaaaattggcaaatgaaatctggagtttttggcattttccaaatctttctcacaaaatacaattctctctggatgcctctcaaatacagggtcccatgattaactaaatgtgggaggcacagcataaaatctcttctaacagatttataatgaaaataagcatactaaaaacttggagaaatcctgcagaatagaattctacttacattagtgtggattggccatcctaaaacatcctggaaccttgttttgcagaacattttacattctctgagcattttgggaaatgccaaattttttattgtaacgctgtcaccgatggatgggtaaacctggggctgtttgtgtgtgtgtgtgtgtgtgtgtgtgtgtgtgtgtgtgtgttaccatgttaatttgatgtagaattaaaatcctcttgagttataccaacaggacaaaagtctcaacattttactatctgtgcaaggcagataatctctagatctcattttagacagtagttcttaattatttttctttatatcagtgctacttgtaacttaaaaatttttaaagttttatttcctttcttgaactctgaaggtattataaaggagaaaaacagtaaaagatgccagcccaactggggaggttggaacagagattatgaatatattataaccaagttactacatttcctgaattgtgggcaatcagttgtgcctttctttcagtttatatcctgaattttttgtagacttcagtatagaaaaaacaaagatttgttttaaggaagagttcaggtgtggccttccaattttactcttcctattataaacaaacacccaacctctgatcaggtggctcttcttgttatgtttggggcctcttactcattcccgggcagtgttcctcggcaatatgcctgtgacaagcgtttgctgtatttgttgttcgacttagggtagttgaaagagtctctctcagccactctctctggatattttgttgtggctgtgggcactgtttgcccagcctctcactttgtagcggaggggtgggactctgcgtgaaaggaccagcgttatagtccctggcttctccggctaattcatcccgaggctcctgccccttcccattctggaaggggcgagcttatcctagacctgtgactgcctctgaagttctccacctgcctcaggcgtgctctccagtgcctgtttctgactgagtgaggttgaaatcctactgactccttttcaggtaaaaaagcatactgaaaaatggctttaggaatagcagttaagatttatatagagggggcagttttgttaagtttatggtttctgttgtttgtagagggctatcacggttttattttcatggtccctgaaggtaagcagatatagctgtatttagtgatagaaaatactatattgcttagagaacccaaacttcccatgaaaattgttatatttattattacttttttctttagactttcttataagagagaaattgaagacaaaattgtgccaacaaagtatattagacactgtgattttgtggtaattttggcatcaattagatatttattttaatatctctttttataaaattttcctaaacctaactgtaactcgaatagagttttccataagacatgtataggtatgatttgcttggctggtaggatttcttggtgtgttttatttatcacactccatattttaaaaattaactgtgtgtggggacaggggatatatgggaaatctatgtaccttctgctcagttttgctatgaacataaaactgctctaagaaatgaggtctattaaaaaaaaacagtcccttgataatactttctgtgaatacttaaatataatgtgataaagcacagatgatgttaaactttttttataaggcataaattttaaaaagctaattcatttttctttttcataattagtaatgaaaatatgggacatatttcagtattttgttttgattgccactttttttgttcaaccatattcagatgggtaaaatgattattttcaagtctcttttcctaaataagaagtgagaataaaaatatactttgaacatgaacgcgtacttattcattgtcttggaaagttaatgagccattatgtaaaattcctttctgaaatcagagagtaaaaattaacaacttagaaagttggtttgtgtatttggtaattatgtttctaaaacccattttttcatataatatgcacatgttcatggacagaggagtgatgctgaagtatgaaacttgtacttagtaccgaataattggctttgaatagctttagaaacatatttcatatttgcgtactttattttttcagttaggcacgccttaaacacatgtagttatgaaacaaacggtgaaaccatgactagccacagatatttgagcataaacaatcttaattataatgactgaagtaaacaaagcatgaccattaaaataaacttattttcgacagatttatacatgaataatatgcaacattctatggcaatttttaagggtgcatgaagaactttcacagctgtcttttatagctgaagcagggacagtggcctaagaattcctttgatagttattacctgttggaaaaaaaccactttatgtgctttttacattaaagagcaattacatataaagtgatgcactctccaaagatacagagaatatttccagacacattaaagcatatgaaactttccaaattttcaacacaagttcaactgtgttttatctttatagactctcccggggctttggggtaagttatcttatacagatggaggctagaactgaagcattatagagcaggagaaggtgcttccaggagacaaggtgtgcaaggcttaatgttgcttacctgtttacctgcacctgtttacctgcacctgtcttctctgaaggtgacgctgttgatgaagctgctgttgagaagacccaagtaattgagactcggtctgtgggcttgttatcggatcactccactgttttccacactttaatgtgcgtgtgaatcatttgtgattttgttaactgcatattgtaccacagcaggtgtggggtgatgaggcctgagattctgcattgctaacaggctcccaggtgctgctaatgccaccatttcagggaccacactttgactagcgaggagctacaccaccagataccaaataactgctcaggtcattgtttttcacttaatggacattgtctgtccatagtgggcagtcagtttgcgaagctcatgactgagatgtgattgaggggaatcgactagctggtgacactggccgctttgtggctgatataactgatgatgtgtggcttgttttctctggtagaaatgtgtgggattgtcacctctgctgaacttccacagcagtcttttccaggactcgtcatccttggcagccccaactcctgcctgtcagcccaagcagccaccaattaagaaagcgttcaagctcaacacccacctttcaagctcaagtctccctttgcggttgctacaaccaccaagggctcatcctcttctcctgtctgccctcatgtcctgccaatcaggagccttttaaatgcattgagtttgatttgcatcttgaacctgagtcttctgtggcatcctctgcccaatctggcttgcaggtgctccactttagctccctgtgaatttaaatatagaaactttatttgtgaggagctgcttccttcctctcacttaacacacaattttccaatgtaataatccagttttgggcatttgattttcataaaaactttccatgtctcagcttgtgagatatgtgtcttgagttctcaatgtaaacactttgccagtctgtaattccagcactctgggaggccgaagcaggaagattacttgaggtcaggagtttgagaccagccaggccaacatggtgaaaccccatctcttaaaaaaaaaaaaaaaaattagcccggcgtggtggtgcacacctgtaatcccaactactctggaggctgaggcaggagaatcgcttgaaacgggaggcagaggttgcagtaagctgagaccgtgccactgcgctccagcctgggtgacggagcaagactgtctaataaataaataaataaataaataaataaataaataaatactctgccagggttctagataccatgtgaattgaactcctgaagggaaggaagtgggcagtggggtgttggtgtgatactccaaattcttcagtgattccttcccattgtactttcctccacaacattgtttgtgaaaatttcaaacatatagtaatttgaaagaattttacaatgaacagctgtgtattcacctcctagattctaccatgaacactttattgcctttattatctgtccatccacttatccctctgtctttcactgtcttatttttgatggatttaaaaataaactgcaggcatagtttgtatattccagcatgcttattattaactggagttcaatatttcttatcagttattcatacgaaatttctattcgatgaaatgcacacatccttacttgtacatagcttgaactttcaacaagtggacgcacccagataaatcagtcctggcaagatatagaacattaccaccaccggagaaagttcctgcattccttccccaacctttacgttcttttttgagtctctccaaagaaggatttactgattgcaagtgatctgtggttagtttatttcttcaaaattgtgctttgatcagttttatttcatgcaagttactttcatacttaggaatgcatgttgtacaacactttcttacaaattaatatttagtttgttaggactaatttatttctgacagaactaaagttttaacaagagtagcttagattatctgttttttacttggtacagatgttttccaatgactttattgattcttatcatgttttatgagatggctggtgagataacataaatagagatgcaaagacatggaggtaaaccatgttctgagaggttctttgggctgacacacctggtttctctggatataaagaaaaaaaactcctctttcaggcagctgtttcctacgaagattgtgtttgaggatacagtaacctcatcatttagcctgaaatataagttggttcacactgcttcttcagaaacagaaagctctatccttgtaataatgataattcatgacattccatgtttgtgggcagtagtttcagtcagctttaccttcaggtacctaacaaggtctggggttgatttggatctgccctgatgtgggttcacagagtcggtaaaacctcagctatccagaaagctaattgtctgaattgccagactctcaaaatggcctggaggcagaaagttaaaatgtaccacaatctctttggtcatgaagaagcagtttttgaatatctaacatagcggtagggatatggtcaaaatgaatgagttataccagcaccataaagttgtttaggggctgtaaagtgctcacattgagttctttgacggtaccatgaaactcccatttttggtttgctccttttcacaaatcactacttcagtggaatatgagactcatctctgaaaactcacacagctccttaagctcttattcacaccttgacatagtttttttgtgtgtgtgtgaatatgatttataaacgatgggtttattcaggtattttctgtaagaaatccacattgtataacttggagttacctatcatatggtaggcgctcagaagcttcttttacagtcccctttagaatgctacaaagaaatatgtagtgattttcaaaggtacatcatttagtagacagtttacgtttccttgctcacaaaagaatgcaagagaatattccagtagtttcaaaaagtacagtatgcaatccttagaaccaaactgcacaaatattcagcagctgtctattcaaaaattaaaaccagagaccatattttgttagggctaatgtatagttgtcaaactatagaccagaacaacaagaatctgtatgtgcatatttattctaatcttgttttccaagttacttaatttatagttgcttttctctgagaggaaaggacagaacaagtattgcaaacacttgctacagtcagttttggcaaaaaaataactcagagagccatgttttaagaaaaataaattcaggttataaatttaagcatcattctactgggttgcaacagtatctgagacttctactttgaatatttcatctgatgatgtaattggaggcggcagaagcatattatctgcatttatttgtgcagttgtgtattatgtaagtggagaattgtgggaaataatgactatttcccccctcctcataattttaagcctcaatggaatggaaagaaatatcaatcgatcttccatatttggcagagtgcttgcagaggccactgtctctgcaaacatgataaacctcattttccccttcccctgtcaacttgtcaagaacagaattaacaggaggattatattaaggcaaaataatttggggttttctgttttgtttttgtctttgtttttaaaagttacttccatgtgtctggccatgtttcagtaataatgtttggcactttaataattcctttcatctgcaaagagcaaattgtttttctgaaataatttcattttgtagaatgactccatagagcaggttgaccccatccatgatctagaatataagaattcatcatataacaaaggaccaccatttaatgccagttttagtatgttttcagcttcaactaaaaacttaagattccataataagagagaagtcaccaagccaattccctgttgagtggaatatcttactcattttctacatacatcctacctatccttgaaagttaagcataaaacctcaccttgctgaagctttcctcactgctataagtcaaatccctgtccatctctccctttcctgagtgcatattgcattggcttataaaccttttggtgttactctcctgtgtagataaagactgttaattactctctaattatattttatgtattagtcttcccatgtcttccaatgtaagtcctctttgcagaaacaccatcttaacacttattttgcatttccattcgcatttccttttcttgtttagtgttttggaaaactgtcatttaataaatattgttggccgagtgcctgaatgttaagagaggccactgtctctgcaaacatgataaacctcattttccccttcccctgtcaactcgccctaagaacagaattaacaggaggattatattaaggcaaaataatctggggttttctgttttgtttttgtctttgtttttaaaagttacttccatatgtctggccatgtttcagtaataatgtttggcactttaataattcctgttatctgcaaagagcaaattgtttttctgaaataatttcattttgtagaatgactccatagtgcaggttgaccccatccatgatctagaatataagaaaaatctcactctgaagttcagtttccaaagacttgggaacagatgatgaactatgctttgcttgcagtgcctcctggctgtaaatataggagctctgtcaactgctgaactcttggttggccttgcaaagctttggtgtggtctgtggtctggggtgtagcgttgagccagtaaaaggcattgcattgttttatccatcctgtgtccttagttagatgcatcgcatgattggacctactcaataagaaaataaagagcagtagtcaatgttttgaccatacttttggtcctgcacagtgttactagttgccaactttatgcaaacagatttacctcatctcctgataaattagaagatctggccacatgcagacttgtgttcttcctttagaggagacacacgctctccagttccacccagcatcccaagacatctgaattagtttcctgttgttgctgctgtaacaaactgccgtaaacttagtggcttaaagcacagatttattatcttacacttcttgatgttggtagtcaaataggcctgcaggaccgtgttttttctggaggttctgggggagataatgtattccttgccttgtccagcttcttgaagttgtgcacatcccgtgactatggctgaatccctctgaactctgtttctattgtcacatgtctttctttgatccttcttcctctctctttcatttttaaaggatttttgtgattacattgagcccactcagataatacagtcacctctctatctcaagatccttaatttaatcttgtctgcaaagccccctttgctgtgtaaggtgactattcacaggttccatgttccacaccccaaattcacttccccacttccaccttcagggaagcatctaattccttcaggctgtgacctctacagtgctgaggaactggcactgatttctatttccctggagttggatatttatccaccaaataagatgagaatatttatttaaaaaactgattctcccccttcacaaattaccgtatctaggtatatcttatttttaaatgctatattaaataatcgcacaaaaataaaacaactctcctttatttcttggcttggttttgctgctactgctgctgcttcttgttttgttttgttttgtttttttctcctggagacagggtctcactgttgctgaggctggagttcagtggcgtgatcatggctcacttcagcctccatctcccagcttcaaggaatcctcctccctcagcctccctagtagctaggacaaagggcacgtaaccatgcctagctaattttttttttattttttatttttgtacagacagagtcttactatgttggccaatctggtctcaaactcctgggcttaagaaatcctctacctctacctcccaaagtgctgggattacaggtgtgagccactgcacctggcctattcttcttttttttttttttcttttcaattttacctggcaatattgtatatttcaagccttttttacattgtagttttcttttcatctacatttcctactaattaagatgtttcttccctccttggtcccttgactattaagctctttaaagcctaattattttcccctgggaaattgctgctgctattgctatttgtggttttcttccttgttttccaacttttaatataacttcttgttaatcactagtccttccttcacaattgtcttatctttgtcatctgacactggaaaatgatatacattttgaacttatgactgtcatttatcagcagaacatagtgtaatattcatgtttgctgataagagagtggcaaaattaatgtcagaaatacagaagctacttagtaatctaagaattgagaaaaactcatctatccacaaattatttgaggcaggaacaatttgtccgtctttgtttctaagaatcatgacattttctcttttgacctgtcttattgttattaatactgatggtgtagctagtgaaataaatagatttctttttagttgattcatagatatgccattccagaactatagtaggacataggtccagaagaccgggtatacagcattggttgtcaccatcagcatcagcattacctgggaattgctggaaatgcacgttgtcagaccccaccccagacctactggatcagaagctctggggatggggcccagaaatctatgttttaacaagctctccaggagatgatgaagtgcaatcaagtttaagaaacatcagtgttttgtattgtcacactagggtgctggggagaagggtgaacccttctaggtctcattctctagatcagtttatgcattcatttgtttagcttccagggatgtcatttccaataaactacattctccaaatattttcagttccgataaacagtgcactaaagattctcagttccaataaattgtccaagtaaccttatttcaccatggaaagaataatctgtggattggcatcaggaagaaatagtccttcttagtttaagagtctacccatactgcttaaagcccaagttgtgccaaattaaatacaaatgttatgctggagtgcaccaatttattcctcttaggtccgtgtctcatccataaaattatggcagttccaataagtgatatgatatcaactcactgaaatctttaaaatgaatagacagctcactctatagaaaaaaactctactccctcccctcatctgcctcctgcagagtcattcaaagtaaaccccacatctaccacataatcccatattcatagcaaatcagatcatccctgacattatctccaaatttggtgaaaggtccattgggcctgttaaaatatcttaactttattgaactataatttacacggaatgatatggatccatctttagtgctcattttgcattgcgtgagtcttagcaaatgtgtacaccaccaccacaatcacaatttaggacctttctggcaccccagaaagcttgttccagtcttcttgaagtccatttttcccaaccccttggccccaggcaactactagtctgctttcctgtcacttttagattctttttgctctctctgggatttcatacaaatggaactatgtattctttttatctggcttttttctttcagaattatgtttcagagattcctccatgctattgtttcctctatagcttttttacattgctgagtaatattcaattgtgtgcacatactaccacttatttacctgttgatgggcatgtgtatatttccagtgtcaggctgttaagagtaaggttcctatgaacatttgtgtacaaatatttgtgtgaacatgtttttatttcttttgggtaaataagaatggaatggctgggtgaggtggtagacgcatgatcagatgtgtaagaaactgccaaattggtttataaaatggttgaactattttcattccatccagcagtatctgagtattttcactaggccatttttacatgtattatcagacaaatagaaaaaaaccttaattttatgttgatatctactgcatatttatttacattatgcacacatatgtaaatgtatatacatacacacaaacagggaaatgtatacatattttattatatcatatgaagaagcaccagttttcaaagtaaaatataagatcttactttatgcataaaattccaacccatgagcatatacacaaaacccttaaactacatataagtaatttctgtgttttccttagtgtttgtttactttagtcatttgctggccattactgacagtcaaatagcaaacttttaagaaaaataatagaaactctaacatgaggaaactgttagaagcttttttccctctgacttgggaaaagataactgccacaattttggggctgtgacttctggtattgtatcatgcaaagtttaagaacttctgggataagcagtgggcaaagggagtgcaaatggaggaaactgagaaagaatgattatataaggagcaacaatgatggactggtggcgaagaaagaaagatttttcaaggaggggtggttggaacttggaaatcaaataaggaatcaaatgaagatggaacccatggctgtggccccatggagacagaaaaagtcagatttatacacaggtcattgtgacactaagcagaatgtgaaaaaatatatccaatagaaataaaagcagcatgttagtaggggcaggagagcagagtaataaaaataacctcgtctctatatatgaaatgctggaattgctgaatagtgttcctggagtgtgggaataaacgatgtggttgaatgggtttgggtttgttttacagattttatcctaaagatatgataactaattaaactactgctgttaatttgtgtcgaataccaagcagagcctcgggactggactgagacagggccaaggtgctggtataaatttcagtgactcatctcttgtgtctaaaatagcggtaggcttgggggcaaagtataatcaagggaggaagtcattttgacacatgttccccttgaaagcaacttagaaccaatgtaagtaattcagtttctcaagctagtgttggaaaaggggtgtagatggataagggtgggaaatggaaagtgagcttgcatcaagtcatgaaagacattgtgttgtatgcaaagacgttttgatttgatcctacttgttttcaagatgactttaggcatacacttgggcctaaatgaaaatattctaatggaatacatgcaagggctcagcgattcttaagggattactttccatgttttaaacttttacgtataccctttcttaaaactgatctgcctaacacctgcctgtcctcatctcattttgtagaaggaagatacttatctcatctttccaaaatattaatatggtacattgtcctatggtataaaaacattccaagtgctaaacagaaaaacaccgtgttctgcaacaaaactgtgcttaaaacatatttgtatcatcagttgataaatcgttaaaaataattttggccaggccaggtggttcatgcctgtaatcccagcactttgggaggctgaggccagtggatcacctgaagtcaggagttcgagaccattctgaccaacatggtgaaaccacgtctccactaaaaatacaaaagcattagctggctgtggtggcgggatcctgtaatcccagctacttgggaggctgaggcaggagaattgcttgaatctgggaggcggaggttgcagtgagctgagattgcaccactgtactccagcctgggcaataggagtgagactttgtctcaaaaaataaataaataaataaataaaaataattttgaatttggatcaccttctgtggtggcataaaactcaaaaggagttcagagattgaaacttttcttagggcaaaaacattttatcagcacttatgtgaagaaaaatgaaaaactggaataaaattgatggtaaaactttgttattttagcattaagtaatattcatagatgtatggattaattttttaaaagccctatccattttatcaaaagatatatttcaagtaaagttttatatttaataattactaaaattatattaatatttatgatatttatgtggtttttgtcaattgcctaccagtgaaaactttagtataacttaattaaaatacattatttcacccttaggggctaaattcaaagtaaatttaaacttaaaattctaaattatgtatatattttgttgtatatagggatatatgatagatcaataaaatacttttagccacaaaaatgtattcattaggataaaattttgcaggggaggtagaaaagaaatagaaaaaaggcattataaaacataaatgttaagtgtgaacttgcttatttttaaataattttggtgtttacattctagatacatttaggtatatctaacagctattatgtttaaattgtcaacatttagaacattctagaaattatatctttaacaacccttttgaacttatgataaaaaatgaagataacttaaaattgacttttggtgagtttttctagatttgtctagaggggtataggcacagattttttgaggaccacaattatgggtaatgggatatcactgaaggattttgaataggggactgtttgataagattggtggctttgaaagggtatttttccattgtgcaggtggatagggtggcacatagaggttggggtgatggtaaaccaggaacaagtaaaacagtgaggagaagagagagggagagttcaaagcatgaaagggagcaggagactcaatattgctggcttcaaaggtgaagtaatagggccatgagattccttggctcatggccccattacttcaaggaatgtgggtggcttctagaagcttgaatgacaatgaaatggatgattcctctagagcctccttaaaggaaagaagccttgttcccatcttgattttagaggtgagatccatgctgcatttctgatctacagaactgtaagatgacatatttgtgttgtttaaagccactagtttgtgaattttattacaggagcaatagaaaacgaatacagcagatttacccaggttttccactgaggaaggagatgagtcatttgatactgagttaagtatgccaaaggttggcagtctagacttgtgggcattttagcctctttgagtacatgcttgttttagtgaatgagagaaagctgttatgaaggaacattttatatgaacttgcttgttttcatttctctacacctcactgtcctcttcctcaaagctaggggttagaatagattatctcaggttctcttcagcttgaaaattctaaaattatttgccttgcataaaatgaaagaaacaaaacacaccactatccccataaaattccttctctggtgagaatgaggggaaaaaaggagaaccacctacaagaattattggtaaaaacacacatagaattcactataaaacacaagcatgtgctgtgcttcagatgccttgtttaggaatgtttagttctaaatgctagacataaatcaacatatgttctggaattttcatgatgaaatctctcactgtgcatcaaagtaagagaaatagaaagttctgaacaggagcatgtattgtcctaacaatcttgtggccccaatattcatcataataaaaatttttctgccttggtattattatggatagtaattattatggataataaaaatgatggtgtattagtcaagatcggctagcttatactctgacaataaacaatttcaaaataaaaaagaccattagtactcattgttcagcgatttaaatctcacaagtagaatcagcctcttgatgggggatttttccattataaagctggtgctacgatctgaattctgcaaattggggcatttattagttagtgatcatatgggattggtctatggaaggatgcatgctgaagtcagttctttagggctacatcttgcctaaactcagtttagcatggctggtgttacaaccctcaattcctttctgcacaggggaataagtaatttctgatataactgctgcctttcacacaaaggtgggactcttgctaagctgctagagtgcagtcaaccttgccacaaagactatgcagatgacttcagtgttctcaattcctcccttggttgaagatcacattcacgcccatttcacccattcaaggactttcaggtgcaaattttgcaagaaaaagctcctcagatttcccaagaatcatctcattagaaaggagtttggaatgtgattctgtctggatgctatttctgtgataccttgaaaactttgttcctacaaaattatttaagcatttgagcacaaaaataaacaaatgtccttgaatttattatcccatatgggcttgccaactgctacagtgagacttgtggagatgataagtcccctgtgagtgaggcacttaagctgcaggacccatatgttgtgcctgattgtaatgcagagaaagttctttggaaactatgaccttaaccaagctttgaatagctgaccaagataaagccatcagagatgtcctaagggttgccattcatagagggtcatcaaaagtctttggcctcatgcactttgtgccaccctcctcactaacattctattcatgatattagtctttttgagacctcccaaatggtgctgatctaattcatttctgcaaacagacttcagatgttatgaggtgtctgtcagatgaggctcagggtaccaagcattgtttttgcttgccatattgatcactgttaaaggtgtatctgaaagtaagtcttgatagtccctagcaatcaaaagtgtttcctcaagtcctaattttttaggtgtttttccctataccttctgagtctcttacttcaggctgctatcacaaaatgccatagactaggtgccttataaacaaaagccatttcttaccgttgtggaggctggaagtccaaagtcaaggtgcctgcagattccgtgtctggagagggccctctttctggtttgtagatggtcttgtcattgtccttacatggcactcaggtcggggggatggtggaggcagagtgtttgtctctgttcttttataatgctgtaaatcccatcatacaggccccatcctcatgacctaatccaactctaattacctcccaaagaccccacttccaaataccattacactggggattggggcttcattatggaaattttgggagtggaggacacaaatgttcagtccctagcaatctcactaggacaacaaagtgagacaaataattgttctgtagagcttcttagaataacaccaatacagtctcccaaaagagagaaagaagatcaataataggggttctaggaaattgctttcagaccttgggctaattttatgaaatgattttgagaaaaggaagggcaaagtgagtaatagattttagcaacagtcatgagagtgggagttgagagggcggtgtctgttttgttgttctttgtccatagcgtctcacctataacctggcccgtggaaaatgttcaaaaaataagttttgtataaatgaattgatcattagctggagtggttttatagcaataagaattaccttgttgaagaattggttcttctttgcctttaaatgtcttcaggtttgggctccattcttgtagctagctgctgactattggtttaccccatgtaaagtgagtaaagggttgagggttttttcttatccttaggctatcaatcacctgcttctggggctctcacagttaaaagaactctttaaagttggctgtgctggaagctacccattataccaggctgaagtgtctacgggaggcatgttcttcgttttttgtctaaaattgagggttttggggaatttgctcaatcatcgctaggcctaactcaagtctcagtaacccgggaacctgtgagctattacagaagatgcatctgtagtatttactgagtgcatggatgggtggtttacagacttctcctcaacaaatagcagggctgtaatagcaagtgacagggagcttctggcagaggtagagattgaagggcaggtggttggcctgttgtctctaggaaatgaactcccagctcaggcgcctaggacatgggacttcggatttttaaactgggactagttgggtcacccagtgctgaaaccttggccctctgccgacaggctaaggggcttcctggtgtagctctcccttctcagctgtctcagccatgtccttcccatgctctgagacaccaccagcagcaacagtttggggatcatgtgaaagaaaagtaataaatacctattctgtttggtcacatctaattgctcattttcatcatatttacaaggaagaatacgcttacagggcctgaagctaccactcagtgacttcaggattcaacgtgtctttctgcaggggtcagggagtcacgctgctctgcctcacagcacagctaggaagaatctgtctgtgtctattaaactacagggagagcaccatttgaaatctcccctgccccggaggatgttgtccaaacataagtggtgtcccagagttttctctaactctccagcccaagtccctcttacagcccagggaagcctggggctcacctatctcgtgaaaatgtgctgtattgttggtgtcccagccaaggtaccccaagcataatggggtaactccagattgggtcactaagcccatctcccactacacaacggccacatttccctccctccctcagttagttctggggaggaggaagtgatgagggctggtgaggcttctccagaacaagatggagatgcaactctaaaaccaggtagagcgggaggcatgggggaaagggctgtgataccacagaggacgtagaaatttttttccatcaccacacataagaaagaagaaaagctgctagatttttaagtttcagttttggagtagtatcaaaaaggaccatcaagctggagatatttatttagataagaatgctggtctaatttatcattattttcaacttctcttgcttgtagttataattagtgataagtaatattttaagtgttttttaatggtttttggaaatattgtatacagacgtttaaagttgtatacaaattgaattagggaaaatggaatctcactttcctgtttgtatgtgttattgaaaaatattattttaattttacatcagatatcttgatacctcactggtattaggctgaaccatacgaaattgctgtttttgttgatcaaaatgattaaatattagttacttcatatagctcattgtaacatatttataccctgggtctttataaccagagacaagtggattaatctatgaagctattaaaaaattctatagtaaatatatttataaactgaagaatctgctttaacgtgagctactttccctgcactatcagtttttgcaagtttacatttttttcctgcaaaaagaggcaaaattaattttaaaaatctaaagccattggaaggtaccagaagatgggacgtttcaaagaaggaattaaattgaaggtagaaggcatcctatttcctacattgacttcaacccccaccaccttctgcaatgattctgaaggcgatccttgctcaaaggtgaccacctcagtattgtggtcatgggaaaaaacggaaaagggatcagcattctttagcttcttttatggctttatttcagctgggttttcaaattttacttgagtagatagctttatttggctcagaatgagtcaaagtggttttttggtgaatgtttcctttaccttcataagcactttctttaaagttccaggtgaaacccccagcatggtggacactgtgtcgtgatgtcattgcaggtgctctatttgagaagccatccatggtttcttcagttctagaaatgcttcagattgataacattactatgctcataggttttatgttgttttgaaattaaattaatatagaaaggaaccatttgagggtggtgacccagcattgtgcctcaaaaaaaaaaaaaaaaaaaaaacctctggtttttatgattaggaggcaatttttttttattcaactagttttgactcttacggaaataaaacatcgccactatgaaccgatttatgagctgtcaggtgatcttatgtgttgtatacatataacacacgcatctaggagctgttttaaaaatcttgacagttgtacattcaatttgtgtaatgctagccctactgtaaaatactctagtttttttgttgggacagaaccacacctaagtgaaacttgcagctagctgcccatctgcccatgaatagtttactacctatttatgtatttatttatttttcagacagggtctcactctgtcagccaccccggctggagtgcagtggcacaatcatagcccactgcagccttgaccacctgggctcaagccatccttctgcttcagcttccccagtagctgggactacaggtgtgtgccaccatgccccactggtaggggtctcactatgtagtgcaggttggtctcgaacttctggccttgaaaaatcatactgccttggcctcccaagttgcttggattataggtgagagctaccacgcccagcctaagactttgcttccttgtggaaaaactccctggaagggaatcccatattaaatagcaggtgctaaatagaaacctagtgtttgactgagtgataacattttctatagttttttttttatttatactgaaatttagaaagggcatattattcagttttgttcttcaaatcatccttgactcctctctctcacactcacacgtggtatggtaaattctgtctgctctaccttcaaaatgtacccaccttcttttcactaattcccttgctgccatcctggcctgagccaggttctctttcacctggatgactggtctcttctcatcctggcttgttccccacactgacccctctccgtagcctgttctgcactcagcaccgaaagtgactgactaagtgtaagtcagctcctgagcctccctgctcagagccctccaaggggtcctcatctgactccgagtaaaagccagagtctttaccgtgacccaccaggcctgtgtgatctgactcctttttgcgtgacctcatctctagctcactgggcttagtcacactggcttcctcgctgctctgctgtcatcctggggtctttgctgtggctgcttcctctcccagtaatgctctgccttcccccactcatccacatggctaaatctctcatttccttagtttttgctcatttataaagctagatttcttattaacattaacccctactccgttctctatttttgctttttccacagcacttaccatcctttaatatatggtataatttatttatcatgtttagcgtttactgcctctctagaatgtaagtgccatagtggtggcagttttgttttatttactgatgttcaccaagcacttagaaaagtgcctcattcatagtagtgattcagtaaatatttgctgaataaatgaacgcccattcaagggtggtgtggtgggtgaacccttattgtcccttgaccttggatgcctgttttaaaaaatcatgtttaacaaatcctaaagccattcttttatggtatgggtttcagacttcacattttacatatctactcatgagataagagtcaaaagaaagttttttaaaaaatagtatttgtcaaaacccattctgattgttttttcttataatgacagattagtctctgccaactcattccagaagcttccatttgatcctcagaggtttttaattggcacgaggctcttttcaggaaagggccactttaacatctatggaaaaataatcatgtacttttaattccacttatctgaaaccaactagtaaacccaaagaaaacactgggtgttttaattttttgaagtggcttgaattgtcccgaggtcatggcatccagtgaattcacttctttgtctttcctgtctggccgtttttgtgccttctgggtgtgaacaactcaagcggtttgccatgtgccaaacgagctgctgcctcttctcctttccagtggtgtggtccaggtccactttgcagactgagttcttttctctctgcaggtgccttctacttctagctagttatcttgtgcttctcttcccagcctgtttatctaaatgagtttcttttcctccagcccagctgcctcctgaaggtacaggaaacccccaatgaaaccatcagttctgcctctgatggtttgcctgtcctttgcctcagacgctgagacctcggtgccctggccacagtgacccttttatttgctttcctgctacttccctacctgttgttttattttttacttattattattattttttgagatggagtcttgctctgtcacccaggctggagtgcagtggcgtgatctcagcttactgcaaacttcaccttctgggttcaggcgattctcctgcctcagcctccctgagggattacaggtgcctaccagcagcctggataatttttgtatttttttttttagtagagacagcgttttaccatgtctgccaggctggtctcaaactcctgacctcaagtgatctgtccgcctcggcctcccaaagtcctgggattacaggcatgagcaccatgcccggcctacttgtcactttaaaacacagccatgcctccacccactgccgtgctctctcttcaagaaacaccagcaccacttcctgctctaaaacatttgcacacccctgctgaggaccctaatgacactgtctgtgtacctcctttatcacagacacttactcttctgtcttctgttttcgtggtgtgcgttgcttcatttcaaggacataactatgtaaacttccatgccagactgtaaaccctctgagggtgaggattacgttatatctgaccctatgtgtaaaactttgctgtgtatgggttcagtaagtatttcataggaccgtgaaacattactggttgaatgggctctggaaataaaactactgtataggccagagttctagaactgtccagatttttaaacattctgtccttttatcttctgaaaattatagttgtatttttccactgatagaaactaagttttagttggaaaatgataatttccgtaggcaaatatcatcctatagtttaacccttcacatgagtgaattgtgattgaaagaagattcaagggtgggttgtccatgttcctcttactattctccatgtgttttacatgaaggcattttgcgttcatttgggaattattcttataggtctctcagttttaatacaaaatgggttataaatatggctctggtagtgaatctctcaaactagaagatttctcccagccacaattcagttacatctagaagataacattcacacatttcttcattcatttcagcaaagagtgactgttatgtgccaggtatataatatgaattgatcagacacaagtccctgctttcgtggagcttacattccagggagtggagacagatgaacaaaaaataaaatgaaaagtgtgccagatggtaatgtgtgatgcagagaaattaggcaggggaggaaggatggaaagccagggaaattgtaatttaaaataaggtgattggcaggggcctgaaggtggtgaaataattagccctataggtaacaatgggaagaacattataggcggatggaacaatggcactgtgtgggagtcacttgtcatgtgcgaggaacagcaaggacatccttcttcaacttggagagggttggggagtaggactggttgattcagagaggtggaggggaattcagaccacttcaatttcttttcagcctcgacactagtgacattctgggttggttaattgttcattgtggagggctgtcatatagtgacattctgggttggttaactgttcattgtggagggctgtcatacagtgacattctgggttggttaactgttcattgtggagggctgtcatatagtgacattctgggttggttaactgttcattgtggagggctgtcatatagtgacattctgggttggttaagtgttcattgtggagggctgtcatatagtgacattctgggttggttaactgttcattgtggagggctgtcatatagtgacattctgggttggttaactgttcactgtggagggctgtcatatagtgacattctgggttggttaattgttcactgtggagggctgtcatatagtgacattctgggttggttaattgttcattgtggagggctgtcatatagtgacattctgggttggttaactgttcattgtggagagctgtcatatagtgacattctgggttggttaactgttcattgtggagggctgtcatatagtgacattctgggttggttaactgttcattgtggagggctgtcatatagtgacattctgggttggttaactgttcattgtggagggctgtcctatagtgacattctgggttggttaactgttcattgtggagggctgtcctatagtgacattctgggttggttaactgttcattgtggagggctgtcatatagtgacattctgggttggttaactgttcattgtggagggctgtcctatagtgacattctgggttggttaattgttcattgtggagggctgtcatatagtgacattctgggttggttaactgttcattgtggagggctgtcatatagtgacattctgggttggttaactgttcattgtggagggctgtcatatagtgacattctgggttggttaactgttcattgtggagggctgtcctatagtgacattctgggttggttaattgttcattgtggagggctgtcatatagtgacattctgggttggttaactgttcattgtggagggctgtcatatgcactgtaggatgcttagcagcatccccggactccacccactagatgccaggagcatactgtctcagtccatttatgctgctgtaacagaataccacagactgggcgatttataaacaacagaaaattatttctcataattctggaggctgagaagtccaagatccaggtgccagtagactaagtgtctgtgaagctctctgcttcatgatgatgccttgttgctccatcttcatatggcagaaggtagaagggcaaaaggacctggctagtttgcgctagcccctttataaggcactaatcccattaatgaggatagacccatcatggctcagtcacctcctaaaggccccacttcttaatactgttacactagggattaggtgtcaacatgaattttggacacaaacttttaaaccatagagcacaccttctcccccacccccgaggtgtgacaactaacagtgtctccagacattggcaaatgtcctcggaggcacaaactcacatttggttgagaaccactgcttcacaccaaagtaaggactttgttaatttgagtggttctttcattttaaggaaagtcctctggctggctgaaggggaacaaagatgggaccagggaagaaaattagcacatggccatttgggaggtgaggatacctagaagctgactggggctggctggcgatatggtttggctctgtgtccccacccaactctcatctcaaattgtaatccccacgtgtcaagggagggaggtgattggattgtgggaatggtttcccccgtgctattctcatgatagtgagttctcacaagatcttataaggtgctcttgtgccttccctcacacttctctctcctgccaccatgtgaaaaaggtccttgcttcccctttgccttctgccatgattgtaaatttcctgaggcctccccaatcatatggacctgtaagtcaatttgtaaacctcttttctttataaattacccagtctcaggcagctctttttagcagtgtgagaacagactaatagagctggggttggtcaggagtgaatcagattttggatatttggaatgattaaccatcaggatttgctgacagactggagaccaggtataaagaaggagtcaaaaataactacgaggatgtgggcctgggcagggaggatgcaggcaaggagcaggttcctggggacattgagagcttggtttgaacattttgtatttgagaatattgattattctctgtattctccctcacaataaccctgagaggtgggtatgctctccttttacaataagaggaccctgaagctcatggagcttggttaattgcccaaggtcacacaatctgtaaaagacagaaagggacttaaatccagacatgtctaactactaaccccctcctccttgatatactttgaagtgattttgtatggtttagaagcctccagtatgaagtaatagtatagtattttataccctgcagagtttaattcagtagactaatttttcatgaaatgcagttctgctaaatactaacatttcaaagcagagacagttgtttcttttgcattttatagcaggatagaacacaaacatgaaccttaggaagtattttgcatacagtagtaaaataaattacatggaatatcagggctatggtttgaatgtgtgtctccgtccaaaattcatacattggaacttaaacactgctgtgtggtgatgggactaagagatgggatctttaagaagtgatctttaggactagtgaccttataaaagggctggagggaactagataggcattttttttttttttttttttttttttttgctttccaccgtgtagggacacagtgttcaaggggccctcttagaagcagagaccaggtcctcactaaacactgaatctgctggtaacttgatcttggactttgcagcctccagaactgtgagaaataaatttctattatttataacttacccagtctgtgctattttattatagaatcatgaacagactaacacaatcagtggttagttggattttaagtgagttctaagttgctatttctccatctgtcctgttggtacctagtcctaccagttatatggcaaatcaatggtctgtggtcagttttgtttggaaatataccccgagtccctctgctagggatctataatacacagactacttctcccttctcccctccagcacctccaaaatatattaagcatctcacaggtacaggtggtgctaaaccatttttccatctcgaatatatttctataggtctgctatggtcatggctatgtccagatattaattcattctgtatgtttttttttttttttaaatatacacatccttagagcttaggtatgatgctagtaggctattttgctcctctgtcatttttctgccaaacccttctgactttttagctgtgctaccaccagaccactgagtgattaacgtgaatggattttcttgaaatagatcctgagaccttttgcatctaaaagcaggttccctatctctttcagctatataattgtgtatttaaacagtgggactcaacaaggtaattgcagtcttggagttcctagcagagtgagccatcgagccggcagtagggagctgtgtgccatgattgattccatgggggtttgggaaatttgaggtgatatgagccgaactgctctgaagagttgcccacaggtatctctgctgttacaccttgtatagttttgtgatgacttaacctaatataaaagatcacactgtcatttctctttgagaataatcagtgccaagggaggtttcttaggaggtctttggcactttattcttgatgagtttttggcagggccaggttcatgaatgtgtgacctgtggaattgcacagggttctagactcagaaaggtcctgcctgtgttttgtgtttggtttaaagatagctgtcagagtcttgaatttttttttctttttttttttttttgagatagggtcctgctgtgtcacccaggctggagtgcagtggtgtgatcaccgttcactgtagcctcgtcctcccagggtctccatagggaggccctgtctctacaaaaacaaacaaaaaaattagctgggcatggtggtgcacacctttagtaccagcaagtcaggagtctgaggtgggaggattgcttgagcctgggaggttgaggctacagtgaactgcactccagtctgagtgacatagcaggaccctatctcaacaaaaaaagaaaaaaaaatgtcaagacagtaatagcagagctttaattcaaacacagagcctttatatgctatagctcaggttggagcacctatccgttaattagcagttttgcccaaaaggggcctatgcagatctcaggcccctctcagaatctatgttctagttggaaacaagggctaatcatctgtatgtaaaacaagctttcaggcaagatgcaaaatgcttcttgatcagcagcattgccaaggtgaaagttaactatgcatgttcactcatcattcaacaaatatttattgagcacctaccatgtgctgggcactgtgctaggagctgggatggacgctatcttgggttccttgtgaagcagacgccatgacaaagatttgagtgcaagtgacttattggaaagatgatcgcaggaaatactggtagaagagtaagaaagtgagacagagacatgaaggaagccaataaatggtttgttttcacagagaaaaactacaactatgtgcaactagggcctaatccactgaggaccagtgtagaacatgcctcggaattttcctgtagaaagacacaggttggttcctttcccactaactctgatccatctggttgagagctgcccagggttatttccagcctgccccctgtgtcagaatgaacacaactcctcagctagagaaagctcttaggcaaagaatcacagcatttgtattagaaagctgtatgtgaatattagattagtgggtgctaagcgtgaggggatgaagagtgacaagttggggccaccattttgaatagattggtaggacagagctttctgaagaggtgactcttgaaaaaagacctatgtctttttaaaattttactatttcaaaaatgggagtcatgcatcaagaaaaataggattcttaagtcatgttgtatataatagacaaataataaacatatattttgatctttgggaatgtttatattcttgaaaacattataactttcagagagtatttggctatttggttggtaattttcttgacaatctctttttgaatactgtggcatcttttcatctatattctaggttttctcagtgttagaccattagacctcatgatcagaatattacagttttcaaaaccaaagttactgtcttctttaaagtatgggatatagtgtctttaagcatgaactgcttttttttttaaaaaaaattggaagctatcactctttttatacacattcattgtgaacttggtgtttcgtgtttttaaacaactgaatgattataagtaaagaaatgactgccttgagtaggatagtgaaataataggaagtgaaatataaattttcacattagaaaaaaatgattcccacttctttgttgggacaagaatgtgaagagtgttccttatgattaaatgactcaaaattgactcactttgtctaattaatagataggccttactgtttagatgtttgtattttacaaatgtattttccaacacaaaaccactggagggtgaactcaggtaattttagctacatttttttttcctgtaaaacatagtttcacatagctttaaaatcaacctttttgggccgggcgcagtggctcatacgtgtaatcccagcactttgggaggacaaggtgggtggatcacaaggtcaggagatcgagaccatcctggctaaaaaacggtgaaaccccttctctactaaaaatacaaaaaattagccgggcgtggtggcaggccaggcgcctgtagtcccagctactcgggaggctgaggcaggagaatggtgtgaacccgggaggcggagcttgcagtgagtggagattgcgccactgcactccagcctgggcgacagagcaagactccatctcaaaaaaaaaaaaaaaaaaaaaaagaacctttttttaatttccttacttcaacccaaatggatgcatctgtaaaattgtatctctcataaatcattctaataatatttgcggtgattataaaaggaaaatacatggggcttgctaattatgagaagacatttgtttgtttgcttgcttaacagttacttcatgcattgtcctaatgcttctttgcagaaatcttttagtagttagtgcctctctttttgtgcagtaagcaatggatcagactgtaagcttttactttactaagtgaggcgatggcaagattttaagaccaaattaggaagtttggtttttctctggaaactatttcatttttagtccaattttagtctagaaaaatagggttacaaacaaagcctaataattcattgcttaacagaagttaaatgaaaaactgcagtttgcatcaacttcctggtttttcgcaaaatcatcccgcatattctttttagctttgtgtggaactggggcttatcacactttaatgtggatatgagtcacctggagttggtgttaaaatgtagattctgcacgtccaacaagcatccagatgatgcagatgctgctggtctgtgggcacctttgaggagcaaggtttctgtgttggttaattttatacgtcaacctgactcggctaagggttgctcgatagttggtaaaacattatttctggctgtgtctgtaaggatgtttctagaagagattagcatttgaattggtagacagagtagaaaacagtgtcttcaccagtgcaggtgggtatcatcagcagttcattgagggggtgaatagaagacaagtgcagaaatggtgaattcttctctttctgcttgagcttagacatccatcatctcctgctctgcccttggacatcggtgctcctggttcttgggctttttgactcaggctgggatcccatcaatcctcctgacctcctatctcaggcctttggactcttattgaattacaccaccaactttcccggctctccaacagattgtgggacttcttggcctccctaactgcatgagccaattcttagaataaatctcagtttatatatatctctctatatcctactggttctgtttctctagagaaccctgactaatacagtctcagacaactggcttcaggattcatcttgcctaactgtgggggcaaaaccatgcctggggaggggtggactgctttgaaaaacaaagaggttttggagataaagttagcctgaaaatttttctgattcagacaaccttgcatcagaaaaattttgatgagccttgcttaggagtgcaaaaagcagacgttacagttttaagcagaaagggctcttgatgttaagtaaaggactggtagagattacagaagaatttcaggtactgtagtaattacagaggcagaactcttttctccttagcaacagtctatgtgtggggagcagaagcttgttatagcagaggtcactacagagaaatctgtgtgtgcaggcagagtcaaaagcaattgaaacaagtttgcactaatgactttggggaccagagtgccctgacaatggaataggagggccatattatcaggggtgacctctaatttgcaattaaaatgacttctgggcatgtaaatggacaactgggtgggaggattgtgtaatgtgggtggcactcagtgaatttctttatcttagactttgatgaaggaaagttattcccctgctccttgcaagctcgatagtgacagatggttgttgcttccttgctggtttctgttcctagaggaataaagtaggaattggtgttcagaattcaggctatggaaagatactgatgtttgggtggacaatttaggtataagaggacattggctgctgttactcaaccaaggcaaagaagggttgtggaaagtcatgaagattaggggtagccaaaactactcatgtgatccttgagcaggttattaacctcttctagcatcaggttagtctgctttcatgagggtaataaggcctatctttggtgggttggagattttatttatgaggggcctagcagaatatttagtacaaaggttctcagtaagcggaggtgttattttagaaatttatcttgaggtatagctcatgattagatttcaagatgagagctagagttctgaattgaatttaaacttgaatttcatcaatacagtatagcgacaaagcccagagggaatataagagatgtaggcaatgtaaaatgcaagaaagcaagatgctcagtgtagtaagaaaactggtagattaatattttccacaaatgtgacaaaatacaaatttatttacagagctcttggcacattaatgggtgaaatgcctggggctgtaatgattagaggagagttaaattcttgtaataaccagaacttagagaattattagatgcctccaggtaaacgaccatgtgggcctctccagttgtctttcttctgatcacctggttgtaacagagagattttattattgtcaacccataactcactgcctacccattaagcaattccacagattctttcctaggacctgtgctgtccaatatgggcaccacttgctgcaatatggctattttgcactcaccacgtagccagttcaagttgagatgtgtctgcaagtataaaatacacatcagatttcaaagacttagtatgaaaaaataatgtaaaatatctcattaatttttgtgtaatatatggaatacatgttgaaataatatttagaatatagcggattaatgaaagatattaatattaaaaattggttttaccttgtcgaatgtggcaactaaaaaatttaagttatgcatatagttcacattttatttttattgaatattgctgcctagaccaccctgggacctgtataggaattttctggagaggcttaaatcaaactcccttgttgccaaacagaaataaaactaaaccaggccgggcgcggtggcgcatgcctgtaatcccagcactttgggaggctgaggttggtggatcacctgagatcagaagtttgagaccaacctggccaacatggtgaaaccccgtttctactaaaatacaaaaattagctgggcatggtggtgggcatctgtaatcccagctacttgggaggctgaggcaggagaattgctggaacctgggaggcagaggttgcagtgagccgagattgtgccattgcactccagcctgggcaacaagagcaaaactccatctcaaaaataaaaaaataaaaaataaaaaaaaaaacaaaatcttatgctgattcaggagaacttctgagctgagaaccattgtcatttctcaacaaaaggactctgcatgagcaagttaactgaattcctgtggtaaacatgttaggtccctctaggtgtagtctcagagatataactaaggtttttatatcatttatacttagctttttcttaactttgttttaagtcagtatttgccaactattatctagaaagcaatgttttttctcaaaggtgtctgtcactagaacacattccccccctctcaaaacaaatacagtagaagaacactgaaacaaaagaaaaatcacatagtgtacttttggtcaacatttatcttgctgtaaaaatagaagaaagagaagaaggtaggttggcatctattaaatggtattacaattactggttctgtttctttgtggaatatggggaatcaacaaagtaaatttattctttctgatcctaagttgtcagggagttattgaaagggaattgcagtcctatttctgcagcagaactaatgtgaaaggagaatggtaaattaaataaggtcaaaatgatttagctagctgcttcagtctcctgaatgatcacatgtaagatgcaaataaatgtagggctttgtgctattaaatagagttatggtttttatcttggaatggatactgtgatgtggctgagtagtcatattaataggatatttttggtcactcacttgtccttagattatctcagttccagagatgggaatgattaagattgtaccctactcatgaggaatagaggagacagtgtgtcaaattggaatagaagaatgagcaatgaattctttcaccagcatatcactgtgttcccaaattttgatttaccattgtattctcttttttaaaggccacctatgaaaatagtagagggctattttgactctcatttaatctttgctgtatcttcaaagttgagagggatatcacatggcttgtgatttcataggagaggtttaggatttcagaagtgcttggataaggttggtctatactcttaacatggtgtgaggagcaggaagataatattgccaatggggactctattagtaagtgttaataaatgttgaagtacttttaaaagaaattccaaaatagtctctagtcttttttgtgtgtcatttcttttggaactataggattcaaagctctggattgtaacactaaatcaccttgacaagtccctagaatcataactagggaagtacattgggtttgccttgggaaagaaggatataaaaatggaggtgtgtttttcttcctaccctccccatcccaacagtggtggaaagtttcatttattcattcaataagcatttattaaacagtgtagaaaccccatgttagataactttgagaataaacctaaaggacggtacgttgagtatttgattccaagttggctttttcaatgttcccatcactgatggaatcctgagaaccctgttagcctagcactgactgtttctttcactcttggatctcagatggtggggacactgaaatctaggggaaggttgtccggtaccacttacaattccagtttctctggttcttcgaaattgtcctgaatttctttaaaatcattattcttagtcttgaaacactaggttatattcataacaaatggttttgatcttaacagcatccttaattttctgagagaaatgaacaaaaattggtattctaaatgccaggtctcccagatttttattatttcagacaattgttgcagcatgcgaaatttttaaaattacaatttacttattttgagtcttatctcttcctgcatgttgttcatgctctccactgcattaatcttcatctatttacatttcagtcaacctgtttatctgttgttaatccatcttctggctgattcctgtcaatctcagcctacaatagctcactgggaatatattacataaaagtcatcaagggcaggagagagagaatggtattctgattttgatctttactcagaattctcaatgactttccctctgtgatagcagcagatgttcccaaagttagttattgaaaatgacagtctcagtttcccgtttttcactcttgactctcaaaaatggataccagctacttagtatgtcactgtgttttagcttcttaaagattcatgttaaaactattcattgtttttcagactaagtgattgtagtttctttaactttttcaatgctgggtttgaaatcatttccctttcttacacgtctgaatgcaatccatcaaccaatgctgttgtctctgttttcaaaatctgtactgaatccaacagcatttcccaatgttaactgttaccgcctttgaccacgccactgtcatcactcattcagactcttgcagtagcctgttagctggtttcggtgctttgttcttgccctgccgtagtcagttctccaaaagacaaagtgttcctttaaaacttaggtcagaccaggcaactactgctcagaatgttctgattgcttcccatttaattgaaaatcagatccaatcattgtctttttctgtgatctgactcccttttacctttctgatttcatcccttctggtgtcctcctccttcacttgctgttttccagctacgttggtctcttcacccttgcagaatacagcattcccctcaaggcctttgcatctgctggtcccactccctggattcctcttcctctcagtcttcttgaggctgactcactcacttctctcaggtctttgctcataagtcacttcatgagtgacacccttgccaaggccagttatctcaagtggtaaccactacccctcccctccccccagcttgctaggaatgcaataaatatttgttgaatgagtaaaataactatttttcatggaaagacatttaatttcctgttccatctatgggaatagataaggaatgcataaaatgatcctcagcagcagaaggcaggtaaacatgacaacaaagtgggaagaaatcagacatggtaaaaattccatatcatatatttagttttcttaaagtacaaacagtaacagaataaaaagtgaataagttgtttaaaaatggaaatcttccttggaacagctaatatttataatcagatcattattatgcaattatgtaatgttactggtataattttgtgttttctaaatattaaatgctcctccctttgcaattaaatttaaactatcaatatgcttgacaaactgccttttataataaaatgtacctgtgtgtatagtactgtatatatataattgcatatgcatgtgtttgcattatcaataatgtaggatttttatactcataaaagttatgatgtattagaattatttcctattgctaaatgggaatctattgtgattattattattggtgtaatattaatattggtaggtattaggcacatatatgcaaccttgtagagggaatatttcttctggaatcagatcttctgcatgttataactgtgtaaatttacttaactgtctgggcttcttgccttgtttttaaaaaggacataataatacattacttatttaaaggtagaaaggtagaaatacatggtactctaacatttgacagattgcaaagagtcatcattttaaaaatcacaatgagatattatcacacacctatgagcatggctaaaataagaagaaaaaaaactagatggtaccaagtgggtgaaaatgcagagtatctgggattcccatgcattgttgggaatgcaaaatggtgccaccactttgaaagacagttggacagtttcttacagtgttaaacatataatacatataacccagccatgccacttgtgggtatttacctaagtgatggaaacttatgcataaaccaaaatctgtacactagtgtttatggtagcttcatgtagagtcatcagaaactggagacaatccaggtatctctcaactagagaatgaaaaaataatatctggcatatccatacaataaaatactactcagcagtaaaaaggaacaaattagtgatgcatgcaccaacacagatgaatcccaaaatacattacgcttcctgaaagaagctggagtcagacttggaaggctacatactatatgattccatgcagtaaaggcaacattgtaggaaaagaatacagatcagtggttgtgtgggagtgggaagagagactgactgtcaaaggggcagcctgagggagttttgaagtaatagaattgttttatgtcttgattgtgtggtggttacatggctgtatgcatttgccaaactcacagcattgcacatgagagagtctattttattgcatgtgaattaaaaataaaaataaataattatcttgatttttaaaaccagttatacctctgatgccaggcattgatgaatcctaaatgtcctaggtgggtgatcacatctgctcttagttccccattttattttactttagttgccgtggtttcctggtgtggctttgtcctgcttcagttattattcatggcatgatggactttggctctgatgtcagaggtagcaatggtggaaagctttcccacattctcccagaagcagtttcatatccttagagggaccttgccagctgactggtctagctcagtggtagtggtgctgacaaaggctgggatcttgtcctgcaacttcgaatttgtagatatatcagctgctttagttcctttataaaaaccaaatagaaatgaataggaaacagaatcagagcaggctgtttttcaaagaaattactccaggctatgcatctggggcccttgttttcaatatggtacctgtctcagggctctgacatcagcagctgtgttctgggtcatgaaaagtttgcagactccagctccatcaaaaaaacaaaaacaaaaaccaggtaactgctgtatcgcactgtgttgtgccccagtgggccagcatatgaggtaatgtctcatggaacagatggttgaccagttgtctttggtaaaaaaaaaaaaaaaaatatatatatatatatatatatatgacaaatataaatactaatctaaacatataatttataactagagaactttaggcatttgggggttcttgtaagctgtacttactcttcttctgttctcacttactggctagtagatacattttatgtttgttgagaatgtgactaatgtaaaggtccttgaggtcatgaatctcttgtaaaaccagcctgtttccagttttctagactattttggatcctctgttttaggtatatcaccctgcttctatacagctgtcttaagagtgctataaacctagattgaacaggaaaccagcttcctaccagcaggttagaagtgacttacaataaactaaaatgagatatttttctctctggcattattctggagcaacagctcttgagtttcctatgctactattcttagtttaatttgcacagatcattttctctatatgcatagttatgtcagtgcagaaataaaggagtgggagaggaatgtaattgagtactcactccaggtttcaggaatgtgataggcacttttcgtgtattattccatttaacttcacaacaatgagttaggtagataattttgctgctttacaaacaaggaaactaggtccaggagaggttaatttacttatattctcaaagataggtttctctcactcccaaaaccactctatattccgaaggctccatttgggaatagtgttttttttttttttttttttttttttcccatttctttgtcacttgcaatgggggatggagattgcactggtcttttgagattgagacctggagcttcttcttagacctggtctgagaaccatgtctgttccctgttttacttttcagagtcccaagagatttggcctaattttatgtatttcttaaaatctgccattacacacgtttgatcacttggttctttctcccccatgactgcctttagaggaaaattgagtcccacagttgcgtggctctgaacaggaaacccataaggctttcttattttaataattctacttctaatcaccacagggaaataggaaagcaaagagaagaaaaaaaaacaaattaaaaagattcaaaatagttaaaatcttagtcgttgagtcgttgagcccagtttacatagtttctgaaacttagttcttatttcttaaaagatactaaaagtcttttttttttcatagagattacttttatttatcattggaactgtagttcaaagcagattcaagttggtaccacttgtgaaattttccagtcactatccaagctctaagattttttttgcgggggtggggatcgagtcttgctctgttgaccaggctggagtgcagtgacacaatctcggctcactgcaaacctctgcctcctgggttcaagtgattctcctgtctcaacctcttgagtagctgggattacaggcgtgcagcaccatgcctggctatttttttttgtatttttagtagagacggggttttgccatgttggtcaggctggtcttgaactcctgacctcaggtgatctgcctgcttcagcctcccaaagtgctgggattacaggcatgagccaccgcgcccggccgctctaagactttcattatgaaccagtgacgtaagaaatgtctaagaagtaaagctatatgtcatgttaaagagactgccactggatgggactggggaatgtatattaggcttaaagaacttttgccgccccgtaatgaaagccagagccacgtgtgatcattgaacatttgaaatgggggtaatttgaattgagatgtgttgtagcagactatacgttggattccaaagactcagaatgaaaaaaaaaacccgaatttaaaatttctgaataatttttatattgattacatgtacattgattatattttaaaattctatgtatactgagttaaataaaatacagacagttcttgacttatgatggttctgcttacaattttttctcttaacaatggtgcaaaaatggtaacacatcctttagaaatcatacttcaaatttttatatttttgcaggctagcatatgtaatgagtttctcttgcaatgctgggcagtggcagtgagccacagctccaagtcagctgtgtgactgcgagggtaaacaaccgtgagatattcaacgcttaactataaaataggctttgtgttagatgattttgctccactgtaggccaatgtaagcattcggagcacatttaaggtaggctgggctaagctatggtgtttggcatgttaggtatgttaaatgtatttttgacttaccgtattttcaacttaggatggatttttcaggatgtaaccttattctaaatctagagcatctgtatattattaaaattaaatttacctttttaacttttaattttgaggtaattacagagtcatatgcagttgtaaaatataatacagagaaatctcatatatcctttacccagttttccccactggtaatattttacaaaacagcagtacagtggcagaaccatgcaactgacgttgatgtaatccactgaccttattaagattttaccagttttacatgcactcatttgtgtgtgtgtgtttttagttctatgcaatttaatcacctttgtaaattcattatgacacgaccacagtcagaaatggaattccatcccaaggatctctgtgccacagccatctcccttccttctctcctctctaacccctgggaaccattaatctgttctttacctatataattttgtcatttcaagagtgttatagaaatggaatcacatagtatgtaacttttgaaatgaggttttgtcactcagcaaaattcccttgagatgcattcaagttgtgttatcaatagttatttcctttctattgttgagtagtatttcgtgtttcttttaacctttgtaatgatgccactagaaagctgaaaattacatatgtaatttgcatttctggctttcattgtgtttctattggacagcattggtttaagggaatgtttgttagaagtaattaaaaagcatatttctgttaagattttcatggaactttaggtattcctgtgttaaatggtgtattttgttctgctaactttaaatcaggttatttggaaataagcaagggagcagtggctttaaaaaaatcatttcaagagagtaaaattatctgtgtccctcccacatccctcctcctgccttttttttcttttttctttttttttttttttttttttttggtcagtttttcagtaagaaaccctttgtatttctatccacaaaagaaacttttcatcaggttaggcagcagaggggcatcttgcaaccactcccatggcattcagcacactggtttgagactaattaaatggctcatatttatctgatattttccctcttgggagctccagaaacttttttctttttcaactgaagcttcaaaaagaaaccagctcagttagcttatgaaggagggaagaaacaggacacagggacacttcagagcagattagaactgaggtaaaggagactaccattttcaattaaaattgcctggggaaattaggtaggcagagaataattacctgggttggcacacatccaagtttctgaaactaagaccctgcttggatgttctgagggatcattgacaaacacaagtagccaaggaccttgaagtttatgtgtcatctcaaatgtattcaagagttctggatacaatggatggctattttaagtcaaattatatagcatgagatgttctaacaaaaccctataaaaaccaatacccttgggaggctgagatgggtagatcacaaggtcaggagttcgagaccagcttagccaatatggtgaaaccccatctctactaaaaatacaaaaatcacctggcatggtggtgggtgcctgtagtcccagctactcgggaggctgaggcaggagaatcacttgaacccgggaggcggagtttgcagtgagccgagatcgtgccactgcactccagcctgggagacaaagcgagactctgtcttaaaaaaccaaaacaaaacccaaaaaccaatacccaaaacaaacgataccacaaagcatcagattaaaggaggtttctgtgacaaaataaatatacatttctgtgacctcagccatgtaaccaacaggacactggggctgagattgaactgtaggagaacatgaagaggactgattaaagtatagttttagtctcttacctccttaggcaaggggccctagtacattaacagtccttggttagcatcttacaagtaccaagaaacatcactgagtaaatgtcctaacacaaggacttgtccaacctagtcgtgcaaatgagtcattgaaagcaaatctgccttgaatgcaaatgtcaagatttagtattgtactccccaccccagctctacctccagtgacctattactattatacaactgctaagcatggtttctcagggtctgtgctgcctgtggctggtggcacgtggtgccgtgctgccattgctatggggggatagaatcgatggaaaaggttttcggttattgaactatagattttttctttctcattacctagaggagggcccaccatctgctccacaataggaaagggatccaatcatgtttcttacttgcttctagtgttagcttttgctgtgttttcattgtttcataatctctcaatttcaaaatggtgcatagtggaagagggtttagaaggaagaaaagagagaaaaaggaatcaattatatttttttctctttcctctttcaaaataaaacacaggggtagaggaatacttgtattattttcttttttaaagagattttcatagacttgctgaacaaggcagctgctggtatatagggtattttaacgcaaattacagaaatgtacccctttccagggctgcaggcctcactcacctcttggtcatggacatgagccgtatctgtctgagtgcaatgcatgtgtgcttggccaccatcttgtgctgtataatagatgcagaaatagcccctattttatactgtggaagcacagatggatgcacagacagttgccttaagaggaagggtcccagggccagtgcatcaggggtgaattcatgctcctttgcttacctgtcatatgactctggataagtgagatgactactctgtgcctcagtctgctcatctataaaccatttctgtctcatagagtttgatgagatataatgagttaatatacataaaacactgagagtggtacctggacatagtaatttctcattgattggtagttattactatttgcttctgacagttttgctgtctaaccaaacatgtttctgaagggagatttcttgaggattctcatttttttaagtcttatctaataagccatgtactagtggatatattaagcaggattttaattatatttaaacttttacttttttttttttctttttttctgagacagggtcttgctctgttgcctaggctggggtgcagtggtacgatcacagctcactgcagccttgacttcctcggttcaagtaatcttcccacctcagcttcctaagtagctgggactacaggcatgtgccaccatttctggctaattttctgtattttgtgtagagatggagtctcactatgttgacgaggctgatctcaaacttctgggcctaagcagtcctcccatcttggcattccaaagtgttgggattacaggcgtgagccaccacacttgacctgcttttactttaaatattagtgtggttatgtatatgctgcctctgtgtaacttcccaataatcaagtcagttgaatgaaagagcagtttaaattggttaacaccatgtacaaaatataacctaatttaattaaaacattttggcccatgttattaattggataccctgtcctaacaaagcaaaacaaaggaaacccaaatttttggtccttctaggtactgagtgtgtgtttgctgctgcttttaaagaatgtcacttttctagacatctagtttcataagatttagtttaaggtcaagaggagaaacatctcttatagatttagaacttggtagagtacagatattctttgcagtagatgtggaagtccaagaacatttgggagaattgttaaaaatgtactgactggttttatttagcctctttgctggtcagttagcttttcttgtgacatagctgcagagtcaagcctgagttacatagatgacaaatgcatgctaagttaggtgttaacaggcagaattctaaggtggccccccgagactactgccccttggtttacatctcctgtatgatccccaggactgtgactatgacgggatgtcactcctgtgattaagttatgttacatggcacagtttactttaagaataaaagtttgtccttgatggaccctaaaaggggttggagagaccgattcagagagaaagattccatcaggggagattctccatgactggctttgaagatggtgggggccatgtgacaaggagtgttgatggcctctaggagctgagagtggcccccagccgacagcctgagtgaacttgtaagcacattatttctctgagcctccagaaaggatgaagcctagccaacaccttgattttagccttgtaagatgctgagcagaaaacccagaaactcctggttaacgtggtgaaaccccgtctctactaaaaaatacaaaaaattagccgggcgtggtggcgggcgcctgtagtcccagttactcgggaagctgaggcaggagaatggcgtgaacccgggaggcgaagcttgcagtgagtcgagatcgagccactgaactccagcctgggtgacagagcaagactctgtctcaaaaaaaaaaaaaaaaaaaaaaagaatgaaaaagaaaacccagaaacgatgtctggactcctgacctacagagctatgagctaatgaatgtgtgttgcttcaagtcactacgtttgtggcaatttgttatgcagctgtagaaaactaatacacgaaggaaaccaggcaaaagaatgtaggttagcaattgcaaagccattaccattatttagagaaaaataacacccataaaaaacttgtaatgaactcctctaaagagccctgttttgcattgtagagccagttggccacagtaaatgacagatagaggtaagttttctgggcagagtttagatgctttctcgggaggggaaatgaatggctaaagtagctctttttcttggtgtttactgcatgacggcaaagaaaaaatacagaataggaagttggaatcccctcccttccatgcttatacatgttgctgatgagggctttcatttagggatcactcacttgggtcggtgagaggagaacataggtgacggagttggctgggtggaagtgctctggagggcgggggctgtggggatctgaaaacccaagctttctctgaggggacagatgcctctcagctgtggctgagttgtctgcagcattctgttgccacatcatccaaatttctaagagaagctgggagtctgtatatttatgtgtagtctctcattttttaatgttaataaccggctcaaactctaaaagatcaccatggattcatataaacatatatgtggccagatcaggcccatgggcagcctctctgtgaatgcagcctagagaattagtatatgggggcagttccagagactgagagaattggagggggtgagtgccatgagttctagaagttttgtctgtttttttcactgccatatactcaaactgagaacagcatctggcacacagtaggtgctcaataaatattgtagcacgaacttgaggaaacataaacatattaataccttacatggatatagaaaatatgactgcattggtgaaacttgtttctaagatttgattacttttaatgtctaggcatggtatgatttgggctaacacagtgtccttttggcccacccactttctttttttaacctgcgattcattcgagggcttttatggaagtcattaggtgctacagaacaaagcaggcattgatcccttctgtgttgcttgggtgccttgctcctcttatctcgtctcactctgaccctgacttctaagatgagtcctaacaccgcctgcattttacagataggagctggtttcagagaggtgaagacagttgcttgaaactgcatagctggtcaatgatggtgctcagctcttctgactgccaggtctttgcccttcatctctgtgcttgatactcagcatgcattggaaccagtcatgtcagcatcacctgagagcttgagcttcacacatgctgaatctcaggccctgcctcagacctacagtcaaacagaatgtgcattttaaccagatatgctggtgatttgtatgttaaagtttgagaagcattgtcctaccccactaggttctaaacttgggttattcctgaatcacttttatggatttggccaaatctgagttttacctgaacttatgactcatcttttccacttaaatgtatttgcttaaaaagaaaatacaaccatgataatgatggtaatgtggtaacattactattataagtagctgtaaataattatagttatgtacccaatagaagttatgtacccattcaatagaagaatgattccattttctataaatagaaggtaagtgctaatgcccatgcattctacattacctctccatgtaccattgtaaaatatctgtattttaagatggtacatggaaactgtaccattaataataaagtgtaataaaccataaaatatctcttcatggaccattagtgggagagtgttccgctttgggaaataatgctatggtcgattgtaaaaacgtccacaaggtcttccccactgtacattcatggctttgcagtgtgcagtgccccatcaagaggtgggaccatttctctatcttttgaatgtgggcttgaccatgtaactagttttgccaaatgatatattagccaatgcgatacaacagaggcttggaaagtgcttgtgctttggggcctgccttcttgcttctcttgcaaactagagaacaccaaaataagtggttattgatttaagctacaaaagtttgaagtctttgttgtactgcacaatctcactgacacaactgctttccaacattctgtttgcttgcaaaacaatcatttccatgttcagtattaagtcagagtaaaatgatctgtttttgttcaaccttgcccagttactcttcactttaaaacaaaatctgaatattgaatatcttgggggaggacatcacatgctagtctttttgtgttcagtacatatatagattcactaaaacaggcatggcaatgtcacctttaaatatttgtaggtttcttcctcctctgagaaataaaagcttcacccttggctaaagttccccattgctttgaaataagactatgtaaaacactgtggcatgattagtggtggtttacagtaaaatattggtgttttcttatggcttgaaggcagttccatatgtatgcttttcttttgtcagggtaaaataaaattggatgttttccatcacaaggaatcccctgaagaatcacaataagactttttaatatatataaattttatcacttactgtgttttcttgaagaatgtgagtgttttctcatttttggaaaaagctgactggcaaactcactatgtgtattatagcctttttttaaaagactgctttcatgaagtataatttacatatcataaaatgcactcacttaaaatgtacaattcagtggtttttagtattaatatattcgtggcattgtgcaactatcaacacaatctaacctttgaatcttcattaccccaaaaagaaatcccatgctgctcctctagtcatagagagccactagtcagctttctgtttctgtggatttgcctgtagtggacatttcatatacatgggaacataccatatgtggtctttgtgcttggcttctctccgttagcatacttttttttttttttttttttttttttttttagacaaagtctcactctatcacccaggctggagggcagtggtgcagtgcaatctcggctcactacaaactctatctcccaggttcaagcagttctcttgcctcagcctcccaagtaggtgggatcacaggtgtgtgccaccacacccagctaatttttgtacttttagtagagacaggatttcactatgttggctaggctggtcttgaactcctgaccttaggtgatccacccaccctggcctcccaaactgttgggattacaggcgtgagccaacatgcccagccagcgtaatgtttctttgaagttaattcacgtagtcatgtgtatctgtgttgcatttttgaattgctggataatattctattatgtgaacgtactacacgttttgttaatatgtttatcagttgatggacattgggattgtttacaattgggctattatgaataatgctgctatgaaattttacatgtaatttttatatggatatatgttttcattttttcttgggttcatatctaggagtggaattactgggtaatacagttacttcatttttaaccatttgagcaactgctagactgttttccaaagcagcagcatcattttacatttccaccagcagtgtatgaagtttccaatttctctaaattcttgtcaacacttgttatgtcttttgattatagcttttctagtggctatgaagcagtatctcattgtggctttgatttatatttccctaatggttaagtatcttttcatggttgtatatcttttttgggaaatgtctattcaggtcatttgcccatttttaaattgggttatttgtctttttcctgtccagttctaagagttcttacatcctggataaaagttctttatcagatttcctgttctgtgggttctcttttcacttttttgacggtgtactttgaaggacaaaagtttttaaagaggttcgacttatcttcttttttcttttgttcttcatgcttttggtgtcacacctaagaaaccattgttctggtcacaaggatggtgccacccaagatcacaaagatttactcctatgttatatttacttttaagaattttatagttttacttctgtgattcacttggagctaatttttgtccatgttgtgaggtaggagcctatcttcattcgtttgcgtgtgagataccatatgtggtctttgtgccagttgtcctggcaccgtgtgttgaatagactgtctctccccattgaatggtcttgatacctttgttgaatgaaacagcttttgtttgcattaacactgatacaactctgggatttgcaattttgtttacctattatgggaaaatatctttcttctttgaaagatcaaaacacgtgggaagacatacataaacaccccagacacacacacacacacacacacacacacacacagcctctgtctctcacacacacactcatgcacacagtcccttctttaccaaagccccatgtaatcccttcatgacccagaataatagtatttgaaaggaaaagttggtatgctggagtcttcattcacatattactacaactccaagtcagttgcaatagtttggctatgatatgccagtagctaaatagttcatgacaaattgcttatactgcttaacttctttgtagttaagtatttcaacattgccttccccacatgttgcaatatcttatatatgcccagaattagaaaggtttatggaacaatgaggcagtttatgttagatagttgctagggaattaaagaagagaagggaaaacatgtgtccagtctctaagtctttgattacgaaatgacttgggcagcaagtggtttctcaaaacgaggagcatggtatggcaggatcattaatcaatgagctttttgggaactcggcctgtttcatagcctcaggagacataaaagagtcatatagtttaacattccagctgtaggtaggccacctaattattcagcattcaacaaagatttattgagcatctactctgtgccaggcgttatggtaggtattggggaaatacctagtggttttcaataacacataatccctgtcttcatgggagtcgtatcttcattattaatacataattacaaatataaatgtaagattgaaaatctggtaaatgtcatggaagaagtggcactgtaggggttaaacatgggcgagggtgcctgggtttgaatgccagttttgtgggattcttgaatattcaacttcttcattcccttttctataaaatgagagtacatacatttttgagtttttatgtggattataaatgatgattcaatccatgcttagagccagcctgcatcatagtaaatagtcactaaattagtaaagtcagggtacatgatgctgtgtattccctaattctgtatatttgaagtgggatgttgctttctgtagagactttggagtgaattggctttttttccattttaattataaaaattatttgcttcatggtaaaatattacataatggttaaatgttaggttaaaatcaaagaccttaccctttaaaaatctccttttagtactggtcccctagagggagctagaggtagccacactcagtgtttcttgttttccctccagatgcgttatttgtgtataacgatatatatgtctgtgtatttacatatagattagtgaggtttgtcttaacacaatggagccatagtatccatattactacactacttcagactttttaaattaataaaatgacctgagaatttgtttctatgtcttttcatataggtacagatttcctctcttgtttttcatggtgtagtcttgtattatatgaatgtaccaacctacctgagaccttattaaaggactgtgctgtagtcatctctatacatagatcgtgaccttcacaaatttcaattcaaactttatagacacagttttcccaggtgtcatcagttgcctctgccttcttaccatatggaaatgggcttccccttacttttgtgtacttctttttttttttgagatggagtttttgtttgtttgtttgtttgtttttgtgagatggagtctctctctgtcacccaggctggagtgcagtggtgccatctcggcttgctgcaagcttcgcctcccaggttcacgccattttcctgcctcagcctcccgagtagctgggactacaggcgcctgccaccatgcccggctaattttttgtatttttagtagagacggggtttcaccatgttagccaggatggtcttgatctcctgacctcgtgatccgcccgcctcggcctcccaaagtgctgggattacaggcgtgagccactgcgcccggcctgagatggagttttactccgttgcccaggctggagtgcagtggcatgatctttgctcactgcaacctctgcctcctggattcaagtgattctcttgcctcagcctcctgagtagctaggattacaggcacgcaccaccacacttggctaatttttgtatttttttgtagatatggggcttcaccatgttggccaggctggccttgaactccactcctgaggcaagtgatctgcttgccttggcctcccaaagtgttgggattataggtgtgagccactgcacccggccacttttgtgtacttctgacaccacctggaacttttcctcccactccaccttgaaaagatcctgaaatctagatttcagccaaatcagaaatccaatgtcaaatccagaatcaacataaacaacttaataacaaagacaatacggaaacagccataaaaaaagactctctttgcaaatagatgtaattctgttataaaaagagttttttccaattacagttcatctaaggacattatactgctaatcaggaaaagataattatatttactttgagaaggttttagatagccttgttgttctattgctgcttaattattttaatagattaagagggtgagtaggatattagcagcattgtagagagagtgtataaactctgttggctgagtatagcagtaataattctgatatgatgactgtgtgtctgtgtcatttgtttgcaacttatgccactaatttttttttgtttttctgacgtttttaaatttacattagattctgattttgaagtgcaaaggactgtttttctccatgaaaactctaaaagtcctttacatcgatttgtcttgtctgtgtctgtttcagaggacagtgctgctgtgagtttgacgaagtggacatcacctgcagtcagtccagagctgcccagtgagtactttaccgcctgtgtggagagtctttggttgtaggtttctagaactttcagtctgtaagatgaatcccttcattctggctgatgctgcttctgaaatgcctctcaaaactgattcacagacatcttccttgatgcggcagagcattaagcaggatctcccagcactttctaggttcaattttattaatttcactactaaccttgggcactttaccctttgctagattttctacttgctctctgcaatagtgttgcccgcatttagtaagcatcacatgtttttgaagtgatcattgtctacaattctttctggggagaaatgtttctgtgacttgttttcagtcctgtgcagattttgcttaagaagattcccactgatgtgaaaaatcacaactgtgtacattatcagcaaaaatcctccattttgggggaactaccaggggatgatgtaaataaattcttccagtgctcccctaatggttcattttacaaacttttaaagaaacgcaaaaaggggaactggaaatatctttatatggctgatttgttttatttataaactgtaacttgccaatacttgtattccagagccagaatcctagtgaatatgagacatgttcttttataatcccttgatcaaattgctgtttgtttatttatttatttttgagacggaattctcgctctgtcacccaggctggagtgcagtggcgcaatctcggctcactgcaacctctgcctcctgggttcaagcgattctcctgcctccacttcctgagtagcattacaggtgcatgccaccacgcctggctaatttttgcatttttagcagagacggagtttcaccatgttagtcaggctggtctcaaactcctgacttcgtgatctgcccacctcggcctcccaaagtgctggaattacaggtatgaaccaccgaacctggctcaaattgctatttttaaattgctgttacaagtaaagcatttggactatgtatcatttcttaccttcaggaacaagaggtcattttatagtaatggcgtgaaccagcaactttattgtttctcctaataggtcctcctggaggatctgttcctctgggctgttggcatttaatggctgagtgttttcctccagcgttttgcatatcatgtgagatacttcattatcttctggcagtgcccgtggctgattttcttccggcctttccatgaggggaaggaagaatcgcacaacctgacacttctctaagtgatcagtgtttaatgatgacaagagatatccagaaagtagatttattattgaatgttcctatctatttttagtcaagtgcgctatcttttactactccccaaggatgactcataaaccatgtcttagtaggcaaagaggagttggggagtaggagggactgaataattctctcgggactttaaatcagtgtggacacatcatctgcttttcactccttcatcacattaatctggactatccactttctctgtttaagagttgtattatccttaaataggtcatttttcatcagctgtatttataaatggttcctatgacgagttatgtgcttattgaatataaacacttgattcaagagtccaaaaaaagaaccccagcagagctcagaagttttgttaaatattttaagttcaaagaagaaattcctctacattaaggagtgtaaatgccatgcatttaattttacaaagccttggctgggcgcggtggctcacgcctgcaatcccagcactttgggaggccgaggcgggtggatcacaaggtcaggagattgacaccatcctggctaacacagtgaaaccccgtctctactaaaaatacgaaaaattagccaggcatggtggtgggcgcctgtagtcccagctactcaggaagctgaggcaggagaatggcatgaacccaggaggcggagcttgcagtgagccgagatggcgccactgcactccagcctgggcaacagagggagactccgaaaaaaaaaacttttacagaggctttggatggctccagatcctggggctgaaacagtacatgggcagtgtactctcgttctcacccaataggacctgattagacttggagccccagatgtcacctggtggttggttgcttatgttacgcttgcctttcttccagagaatccttccatatgtccctccatcctctcctaaaaataaaaccatttggcctctactctagcatcattcacttgctacatatcttgaattgtgagttgtttttaaaacactgaactaaaatctgattcttctataatatcttcccatactcaaaattggaaacatctaaactctggaacctgagcatttctggttttgtcttgaaatgcctgctttacttccccacacttccaacggtgagcagctctgactctatgttagttctaaatgtattttttaaggcctatttatatgcagagtaggcattcagaatatgttcttatttctataaaggcaaaaggtatattttgaatcttgcttatatgtcacgttcaatttagcttttttttttaaacaaaacaaaacagtgttggtcaataaactcctaaaatagaaaatatttatttagagaacaaaatgactgtttttggatgaattatcctcacccttgcattaagtgacctttgcattgggagctttagattggctcttgctgaagaggaatgccttagtttagtccaatcaaaaactgctttcaagtttcaggaaaagaaagtaaacaacccttgataacttctctcctgtggcattttagtttggaagatacactgttcttctgaaaaacctatctaatgttgggggtgctttcttccttttaaattgttttaattaaatattcattatagaccgggcacggtggctcatgccacccagcattttgggaggccgaggcatgcggatcacctgaagtcaggagttcaagaccagcctggccaacatggtcaaaccctgtctctactaaaaatacaaaaaaaagttagctgggcatggtggcacatgcctgtaatcccagcgattcgagaggctgagacaggagaattgcttcaacccaggaggcggaggtttgcagtgagccgagactgagccactgtaccccagcctgggtgacagacgagactccatctcaaaaaatgtttgtattaattatatacagaatttataacattagtgttaggcatgcagctcaccaaacttaatgttgacttttctttcattttgcctctactttagagccttactcattgtcctgtcttctcttacaccttggagacatagatatgttgtaccagctattagcatatttttttcttgatctaagatctgtggcctagggttgctgcagtgctctataggaatgaggatccttcttattaccctgtaaatactttagttatttcaaactcttgagtgttacagaagctcttatccatggtacaacaatagcaagcacaaaaacctgtggtttctttcacattttcttagagcacattcatgcatgccaagagtcgtgagatgagctctccagaagcagactgagaagaggatttctgcacaagtggtttatcaaggcagggctcccaggagaaactagtgagtgggggaagggaagggaaagggaagaagccaagcagggagatgattcaagcaatgtgcctgccccagcctgatcctgggggcagagttggggggtgcagtgggccgctctggaacataattgctccctagagtctgttccacatcaaggcaatggagctgggcttttccactcctgcatcagtcactgactgtgggcaggtaagagagggctataaacttccaagcacctctgctgtcttcatctgcatgtgaagcagcttcggtggttgaagaaggtttttcttaagaaatgttggtaccatcccttagcagcaaagcacacaaaagccgggaaagggcacacaagacgattaaagggacccagtgttatctgggcaggacactagagtgtctgctttaccaatccacattccatcttcctccttgcctcactcctgcgggcacatttttaatccttagcccatttcctggtgtaggttaagcactttcagaggctgcataggattatttttcctcctctgagaatggagtcagctactggttcaaagagctaagtcctaaagtaattgcagtgttgggagacacctaggtaattttcagtgagtagaatttctacatatattagagttttagaaatagaaaacttgacatttcaaagctttccttagtaaaatcatggataatgatttcagtgccctgaaagaagaggtgaggatgtcatgtgattgtatgattggagattattcttactaggaacatttccaggcacacaggttaacttcattattcttcattctcatctcttttagccatcctttattttatttcctaatagttcacctttgcctttggaagtattttcttttcataagcttttaagggaaatatatagtgtttcttgggcaccttctatttatttattttattttgttttattttattttattttattttattttattttattttattttattttattttattttattttattttattttgacagggtctggttctgttgcctaggctggagtgcagtggcttgacatagctcactgcaccctggaactcctgggctcaagttatcctcctgcctcaacctcctaagaggctgggactacaagtatgcactaccatacctggctaatttgtaaaattttttttgtagagatggggtctagctatgttgacgaggctggtttggagttcctgacctcaagtgatccttccaacttagcctttcaaagcgccaggatgacaggcatgagctactgtgcccagccctcttgggtgccttcgattcagtacagcacaaaatttcatgattgttcacctgatgtcctagaccagccaacactgtccaatagaaatattacgtgaacaacatagaacattttgaattttcttgtagcttcattaagacagcgaaaagaaagaggttacagcagcctaaactggaggctggaatgtccaaaatcacaggtgaaattaattttagttacatatttaacttagcatatccaaataattatttcaacatttaatcaatgtaaacattatggaggttttacctttttttgtccactgaatattttgtacttaaaacggctttcaagactagccatatttcagtgctcaaaagcaacatttggctcgtggtaccatattggccagtgcaactttagaatattatagagaaactctggtaaaaggccttattctgtttgaataagactcttagtcagtgcttctgaatctcccagcttggtaacactactcagtaaggaaatgaggcagcaccgtggtccagagagagtgagctgatctgtccttgaggtgctattgctacttccatttttggatttagtgccctgttgtacatgaattaggattaaaacatttaggtttggcagctcagatgtcactgataaccttcaaaggtcacttagaagatagtgggccttgaatggagggtagaaagtagaaaaattttaaagaggaaagggagggaatttcaatgggaaaaaaatctatatatgtatatcgtgtgttttgggggaggattctagaaaagtttgggtataatacttttatgcaaactcatggggctggagtgttacatatacaatgagaaaggtatagttagtggccaaactgataccagactcaaagagtcgaattttgcagtacatgaaatgagatatcaccatgatatagtatatacgttgggacctattctggttatttattgttgtgtaagaagtcacttgaagatatagtggctgcaaacaacagcagtcacctttttacctctcagtttttctgtggtcaggagttagggaagggcccggctgtgcatttctggcttgagttctttcatgcagttgcagtcaggtggcagctgacgctggaagagcaggcagctggtatggctcagcgtttcttcctcctcacccagtctcatgtggtcttttctatgtggtctctcttcatgggcagctttattctcatagcatggcagcttcagagcagggggacagcctgcctgggcttcagtgtgattattctgtccaaccaggtggaagcagcattgctttatgacttggccttggaagtcatgcatggtcacgtctatcacattacagtagtcctctcttatctgtaggggttacgtcccaagacccgcagtagatgcttgaaactgtgttaagtactgaattttatatatgttacatttcttctatctgataatcaagataactactagtggccaatgagtgggtagctagagtgtacagcatggataagctagacaaaaggatgcttctggatgtgagagattgcattgtgttcctcagaatgggatacaatttaaagcttatgaattatctcgggaattttccatttcgtacttttggactgtggttgaccttgggtacctgaaatcatggaaagcaaaatggcgtctgcccagtttcaaagggaagagacttatgagttcaactctcagagacaggagtgttgaagtcacaatgtgcgaagataatattgcaactatttttgggcaatatcatctgcctcagggaccctctccattgccactcctgtacccatcttgctctcttgagctgtgctctgggagcgctgtggtatgagcacagctttcattcccgggcacccttctatacagtggctctctcttctctccttacccagtaagctggactggacagtccttaacaaaatgtgaagtcttctgcttaggcactaaatggccaaccctggccctctgtttatttttcattatcttccttctttattgttagaggccttcccaagcagtgggcaaacaccaaccccagctgttctcctctcattttttaatttgtggagcaattgagagagaggagagagaaagagcaaaaacaaaaaggaggaagaattttctaaccccttactggtcttactgaaaagacttgtcttaccttttccacctaaggatgtcatctccagaagacagaattcttcggtttggccaactgccaggtttttctcaccatctttccatttctaggttgattctcctttgctctgtctcttgctgtccctggccaactgggtttctcttcccaaggtgattagaaggaaaggggaaaagcatggggccaacaccatgacctttgagagagaactttcctaacagttgctaagctcaacattctaccaaatactgttcgccctggttttcataggaaaatccctctcctttgccacaatctcatctttacctcaacatgggctctgaaactaggtgcatagtgagcattgacttgctttcttttccctcctttcttttgtgaagtcatactttcaactggaaaagattgaaatgccagctgtgtaagagtttaggtgaagcatgctgagttctgcaacttatttactatgaaatggattaaaaaatgctgatggatggatagaccgatgaatgaagggctagatattcaaaaaagctagtagcataaagtgttcattgtagaatctagctggtaagtatatgggtatactacccatatatatcacatagtatatacttacgctgtataaatatacataatattaatttttttcaactttgtaaaagaaaaagttagagaagagaagcattaaccataaattatagtagtgggatacatttgaaaacaaaatgttcatttcctacttaacaaatgcttaaggcttgtcttggttttcaggtgaactttttaaaaggttgtattagcattgttaattgttctaccttcagtttaccttcaaggtttaagggacctggaaaagatgtaacagtcgagtctagaaaaatagtctaaaattctagccgttgcccttagattttgtagtttctttgagcttgtcacatattgcttgtgagtatgctattgaagtcattgtattacggttgtttttctgtgtcatttcctgagggcctttgtggtggcaatagtaagaacttattccaaagataggatttcttgtttcctcacctgttccacacactcccatgttaaattgggcattctgaatcttttccagaactgaaatatggattttttcccctgcattgggcatgtttgctttgttttatctgcttctataagagagagggaacaatataaatccagttcagctccctggattattttttgatatatcaataaaatgtttaaagttattggaaattgttgcatttgaaaagttcttaactattttacttttctgaaatgaaaagaagagcaggcatcttgtctttgctgtcctcaggtgggaaagggcagcttgctgaggactgaagactaaaataaaccctcccaggagaggaaccggccggtgaccttggctgcaaccaccttgcagatcagctgcttcattcctttccatattttgtggcctgtggggggaatcaagtgtcacaaaagcaggaagagagcagtttgaggaagactccagaggcactgctggtaaaagtgctgacgtgatctcctgaccctttccgtatggctggaggactggtggttttatagtgaccattcaggtagctgggaggaggcaatcctcctgtgaaaaataagctgtaagaaactgttgcaacagttgtgtttttttatactcctcatgtaataataaagcggtctagaatttggatagatgccgttacatttttgcattggaggtatgttaaagagcccatactgagctaatagaaaaatagaagttaactcactcttctgagcaagtagaagtttattgaaaaactgaatgattttggtgatttttaaatttgtcacctggctggatacatcacagtgtggtgggaagaatgtgagctctgaaacctgggacctgggttgtcccatctgtaaaatgagcacagtattacctttttcattggttttggaagtattgacagggagatggtgaatctataggacttttcttattgcagatactgagaatcttcgtccccattttccttcctttcctatagatgctgatattataaaacaagattttcatgaggctcagaactaatttctaatgaattcacttattcctcctcttctgtgggcttctgctctttcttctgtacaagtagaaaggaattaagagtctgcaaggcaccgatgttgaggagctcactgtatcacattattctcattttgggacccttttcctacctaatagtgctctgtccctgggactttacacagtgacatttctgtggattctaatcattttaccttcccattagcaacagcaagtgttctgatttctttccatcctcaccaacactaattttttgttttttttgtttgttttttttaaattagagctttcttagtaggtatgaaatggtacctccttgtggttttgctttatattccctaatgactgatgctattgttcaccttttcacttgcttgctgatcatttatacctcttctctgccctttgcccattttttaagtgggttgtctgcttttttgatgttgttgaattcattgtaagactttttttttttatatgtactgggcacttgatccttttcagatatatgacttgaagatattttctcccattctgtagactgtcttttcattttcttgataacatcttttgatacacaaaagtttttaatttgacagtcaaatgtatctattttttctttttttcccacttttcttgtcatatgttagatcccttcatattttgttgttatatttaagaatccaagtttatgaagaattaccctaagatttacaccctgtgttttcttctatcagttttatgatttttagcccttatatttaagtcatagagccatcctgaatatgatgtgaggtaggggtctaatttcattaattcgcatgtagatatccagttgccccagcaccatttattgaagaaactattctttccaagattgaatcatcttggcacccttgtcaggagtctattggctgtagatttgtgggtttatttcttgattctaaattccattgcattgttctgtatgcctatacttatgtcactgacacactgtttttattactgtgtcttttgtagtaagttttgaattcaggaaatgtgagtcctctagctttgttctttcccattattattttggctacttggggggctcctcttgaaggaagagttttattttataaataaaaatgtaatacttttattattgttttgtcctgcagtgatttttcaactatggtattatagctcaggagaaagcaactccagtaaataatcatgtgattgcatatggggttattataggcatgctacaatccaagggcttcttttgcttaaagttttacattctagaagccctggaaaccttgatgagaactacatcagtggtattcaaagcaaagccagcgcacagactgctaagttaaagctgcttgttagaattccaaggggccatattccagcagccttttggaaaagagcaaatgtatgagcttctcatttgcagtgataactagacactgtcctgatttatgcatatgtttgcctgtactagttattgccttcaattatagaagcaattttgaaaacaactttctcttatgtaaaagaaagctgtgatacaggcatcaaaatcaggaaaaaaatcagaattgtgatgagagagagtaaggaagaaggcaggtgattttcctgggataagtcacatttgtttccagtatgtttgacctctagaccattcctttttgagtagaggagactatgtaggattttccttttggaaagaacttttgtctgtggatccttagcaactactctttaagcacttccagatggtctttaaagtcctcatctaatggaagctgagagattgttcctgggggttagggggtggatagaaaagggctttaactactggataccttgacaatgggaagctataagaaggagacacatgtatttttcagctgaccctcatcaaaatacaattagaagtaggtacatatgtgtgtttatgtgtatatgtgtgtttatgtgtatatgtattagacactgctgagcctagagcactgagtgaaacacttcagtaactataatgggagaacttcttggattagacaaactaaaggaggaagaaagaaatgggctagggcagaaggcccagggccatcttcatgggtagagaaggttgacttctgggcccatgcagaacctcctaaagctgagatggagagaatgctgagaagcagattcctaagaggcagctgatatcaacaggcctgactcgggccagccagaactcaccactaggtccttggtcttcatggtttggcaggagcttttggcatcgctgtgaggataacattctcatctggtgcaaacaacaaaataaaacaaaccccatgctcttagagagtgcctaagacattgtgagagtttaataaatgatagctattatttttgtttaatatacaaaaagagtggttcttaaaggtcatcccataaagcagccttttttaaggatctccagaggaagtgtggactacagtctcctgtctgattcatccactgtgagagtttatttccctacgggcgtggaaggactagcaacactaaaatctcattaaacgggtacagaatgaagctgctttcagtggatgtgtgctttcagatctatcacaagtgtgagtagttgtcattttttagccactaaaattgattcagaaattctgcaaacaaaggaaggattttaggatgcagtgcagccagaagaaggccacatgtctcctgcttgtgctcagtgcctttcatggaggttattgtgcagtatggaaggtcagtaaccaaagtgcatgctgcagggagaaataccaaactgtcaacagggattccctttcaaggttccattggagttggaagttttacctctttattttatgttttctcaagatgtggtgaacttattttttttttatttggtaccttttaatacatctaaaaacagtttttacaacaaatctgggttctttgtgtttaaaacttttttccttcaaattttaagttcaggggcatatgtgcaggatgtgcaggtctgttacataggtaaacatgtgccatggtggtttgctgcacaagtcatcccatcacctagatattaagcccagcatccacgagctatccttcctgatgctctccctccccctacttcctgccctctaacattttttttgaaggttaaaaaggaattatcagagtgattatcagggaaaaaagctgggaaatgtattacactttttttttccactggtaatgaaaatgaactaggactgataacaaaataccatagactggatggcctaaacccacagttctggaggccagaagtccaagatcaaggtgttggcaggtatagtttcttctgtggcctttctccttggcttgcagatggctgctttctttctttgtcctcacatggtgtttgctgtgtacactcacattcctgatgcctctttttgtgtccaaatttccttttcttataaaaacaccaatcacactggatttgggcccaccccaacagccttattctaacttaataacctctttaaagatacagccaaatacaaatacaatcatgttctgaggtacttgggggttaaggcttcaacatatgaaatttgagggcagtgggggataaaattttgtccataataagcagtataggggtaaaggagaacataggtaaagcaggaactaagaaccagaaaagtgggtcaaagttcagggccatgaagttaagaaaaagttttaggaggggaatctgtagactgaaaatggcaaagaaaggatttccctgactgaccagtgtctcagttggctttcacaaaataacaaactaccctcaaaatttagtggcttaaaacagtagcccctcatttaactcacaattcactgggtcagcaatttgggctggccttgattgggaagttcttttggtctccattgggctctcttatgggtctctgttcaactgccaagtatgctgagggctgggtggtgtagggtggtcttagctggcatggctcatttcttctccatgtgtctcttgctttcctgcagagtagtttgggcttgttcacatgacagcagcaaagtacccagagtacgagagcaaaaccatgccataatttctgccacaattctattggccaaggcaagtcacaggccagcccagagattcaagaggtgaggaaatagacctttttaggtgatggctttaggagacaaggattatttgactgtcaaagtcccatggcctattatattttatattaataacagactttgcttatattcatgtatcagagaataataacctggaaaggaattacaagcgtatttatttatgggtggtacttctgtattcccaaatttggagacatagtttaatcagagcatttcttaacaacgttggttggcttttattttcctgtgttgctttgtcatccagaacactgggagagatcctaggagaactctgggtgatagtttccattttcagaagtctgggtgatagttcccttttcttcccatatcttactttgaatgaagcctccatggatgaggtagcccaggggaaacctccagctattatcttgtggggttaggtcgtatgaagctcttacaggagaactgggtctttagggtgttgtgtaggggggtaacttaggaaaattcagccataacaccttatacaggagattatgctgcatataaaccctcttggagagagctgccaccttcttgctgtattcactagtccttggtatccacatggggctctgttaagggagcccccccatctaattagttcaggtgttatataaaacatgatgtatatagcagtgctccttagcctcgttgtgggatagtgcaccgaatttctatggagatggggaagaacatattagcattttatagggcagagagaggaaacttgtgtgtagagtctgaaaatttcagtattaaagttttatatttggaaagcaatcataaaattttcagtacatttacataaaaaacatcttggcagattcttatatagttaaacatatactaaccatatgactccagcaattttacttctaggttttgtttcccaagagaatgaaaacttacatccacacaaagactcgtaaacgtatgttcatagcagctttagtcataatagcaaaaactggaaacaaccaattatccgccaacaggtgatggataaaaaagttatgatgtgtgcatgccatggagtactgcttagcaataaaaaagcaataggtcattgatacaaacaacaagttggatgaacctaaaaaacattctgctgggtgaaagaggcacctcacaaaataataaatgctgggtcatttaatttatagaatgttctagaaaaggcagatctaatccatagtgatagaaagcagatcagtggttgcttacatctggcatgtgtgtattgaaggagggtgatgacaaaagagtccaaagaaacttttgggttgatggacaggcctctaatatcttgattgtgatgccagttagcatagatacattttattgcatatagcacataccttaataagtttggcaatttgggaggaattgcctatgtttcttgtaatgcaaggcatcattaccctagaacaatataaaatctttatgatcatcaaaagggaacatgggtttgattaaagattaaagctttgatctacctttagtttagggattattcatttgtctctaaattgtctattgttgaaaacagtgggcaggaataaacaagaaaaccattcagagtctcatcatattatatacctggctcctgtgactaagccaatatcttctaaattaaaaccaaattttaggaattcttcaacagaagtatggaaacttcacttatttagttgaattatggtagctacagctgggtaaagtttgtaggtaattttcaacatttgatgcagtgcaaaggactaaagatcaggtttatggtttatagatcatatgtttatgtcaatcaaatattatttctttgatgaaaactgagtggtacaagtgggtaaatttttgtgtatgctatgtgagttctggaagagacaaaagtaaataagaacaggagaaaaatagtcccttagaattatcaaaatcctattttggctgttcagtctccgatagtttaaaagataaagctgagagaaaaaatatgattgtaatatgtttatttgggttgaatgcttgatgtaacttaggaagagaaacttctttgcttttagcatcaaagagtttattagttcccagatgtcattcattccccagagtgctagagacagtgatttatattgtcaaaggctgacaatgccaaaatggaagcagattttgttttacttcttaagccaaatcatagtctagttgaaattactcaaatgtatctcattttagtttcattttgataatccaaaaatgagtttcagatttcatcttctaaatgttttaatgttaaatgataatgataatgacctaaaaaaattttatgtttccgtcctcattagtgtttgctaaatagtcacttttttgtaattttttttctgtcatttgttcattcatttagcaaatatttattgagtgtctaccatgcaccaagcactgttctaagcacttggaagagagcaatgtacaaagacacatccctgatctcataaaggaacattttctaatagagggaaatagataataaaaagaagtaaacacgtgaaagaacaggataatttcatgtagtgataaacattaagaaaataaaaggaagtggtatggtagaggctatggtaggataggtgattcatttggatttatggtcaaagaagattgtactatgaaggtaatgtttgagcttagatccaaatgatgagaaagagccaggaatgtgaactaagagtaccactttctagatggaggcaaaagcaagtaagtttgcttgtaaataaggttgcaagtaagtttgagaagaacttatgtttaactaacagtggccagtggggagcaagtggtagattaagtcagaggggtagacagcagttagatgcatgatcacctttagaccttcgtaggaaggagtttttaaaattgttgatgtttcttgtttgttgtttgtttgttttaaatggaatgggaatttatcgataggcatgctctgatttctattttagaaaatcactgctgcagtggaaaatgaattgggagtgtacagttggggataaactggaagcagaaaagccagttaggtagctattggattaacacaagagtaaaggcttatacctaagtgctggaggtggtgacgtagagaaaataagcaagtttgggaactattttcaaggcacttcagcagcagatgagttggatacagatggtaaggtgaataaaaaaaggcactgaggatgactcccagggtgccagattgaacaataggtaggaaatttactgagatggaaaagactagaggaaaaatatggataaaaaatcaaatgttctgctttaaactttaaagctttgtatgcttattgagtgtttgagtgtaaatggcaagtaagcagttggatatatgagtctggagcagtcagatccatgagagctggggatgcagaagtgattaatggaaatagagacagcctctaaagctttggggccatctgtgatcacctaggaagagaaaatacatagaggtgggtcactcaaacatgtagaggttaagcaaaccaaaaaagatcaggattgtggacaagtggtgggtgaggtcaggaaaaacttggagattgtagaatcactgtcactaagaaagagaatgtttcaaataagagagagtagttcattgggtcaaatgctgtcaagatgattgatggagtcagaaaagtgatggttgaatttcaaaacctggagatcattgaggaccttgacgagaggaaagaagaattgtaattcgactggcctgaggaaaaaggaaggtaaggaactgaaattttcataggttgacacttgtaagatgttggattgggggtaattttatcattgagaaagggcataggaaaaagaggctggttctttgaggttactatatgatataatcattttagagagtggaaatgtaaatacccaaagaagggttactggacaatgcttgagtgttcatttgagatttgtcctcatgcatttaaagtaaagaccagtttgtttggccatcagttttctccagccaaactccattactgcagttgcttagtagagaatgaagtgtaaccatgtttggggaattaacaaagcaagtattctggaaagagaatgaggcaagggagtgaagagtggttgtaagatgtgatggacaatggaatataggatgggtaagaaggaaagggacacctaaggactgtgatggataatgaaagtgtggtagggtcagtggagtgtaggcctcagattggtcattgatggacttggagttctaatagagaagaggacaatcattgggcagggaaggggtgcttgcatctgattttgaaaggaagtacagttgctggtgatgatgatgtcaagcaaatgcacatagacatggctgactgaagttgaatggacaaatacacaattggaagttaaaaagtcaagggtgttgacctcacctgtgctcctgttaggccataaatgttaaaatgtattgatccatagtattatagaaaaatgtataatagtgtctgtttcctttgactgtagttgatgtaaactgactctttttctgtagtggacaacaaactatacatattgtagcctcaggcattcagaaagactggtctctttccaaatcccgctttcaaaaatctcagagaagacaatgactcgctcagcattgattgtgaggcctctgcaggagcagtcagctctgactggcagaattctcagatgtagaagtgggttgttgggcagataatcctgtaaatgccccttgcagacaccagctggtttacatcaggaagtgagtaagaaatgcttgggcaagacacacttcatgaaccaactcttattgaagagggatgaatgtaatttaagctccacagtcattgtttttggcatcttcacgagtggtctggattttgttattaacttacctttccggtttagctcagcaggaaacttagcaggctgtgattgtctttatctattccaggccagatatctttgttgcctagatgccttggcttgtctgtgatttgtttgtttataagagttgtgcaaatcataaggggatagcttattggatattcagaaagtgaatgagcccaggtaacctgataaagaaacaggacattcccaatatgcgggatcccccttcagggctttccatggtcaccatcccttccctaagcgtaatctctttcttgactttttataccttagattaattttgtctcttgatgtcttgatgtttgtacaggaaaatctgcttatggtaagcaggtactctggcacagataaaaccaagaatgtttaagtgacctataggttagtgcttcctccaaggcctgaaatccttgctgttctccacccctccaaccctgccaaccgccgccttccagaacaaggaagaataaccttatagcataaagaactactttaccttcaaagtctgctggtaattatgtaatgatataaattgataggacacaagatcttttcaggcttttccttttgtgtgcgtgtgtttttttgcaaatacgactctctggaacattcatatcaagagtcctgcagagaagagcctacttagactgagcctaattgcacaaggcagtgtctaatctttcgtgtgtgtgtctgtagtggagacctctctcctgataatggtaacagatgctgatttttaagtgctgtctgtccttctgcaacagatcagtgctgggagatgtcagacaccaaggcagagctttcctggactcattttggattgatgggagaggcacttatttcagacaagcggtagcattctacgtgagtttctatggaaactaacaatgtcagatgagatcaacagctgaatgctatttaatccaaaggcagcttaggttatgtgattttggataaaagttgtcctgtaagaaacaaaggaaaagatcatttctttcatgggaacagacaactgaaatatgatttatttacccagccacatacagattactcttgttatgtgttgaacacataggacatcatgacacctatgtgataggttttattctaataacttatctaaatgataccttcatgatactgtgtcacagaaatacagattgtggaataatgtgacattctcccacaggtcttaagagagaatgaatgaaaaaaaagacggcttttctgtattatactttatttttcctcacttttctttactgttttatttattgtggtataattcacatgtgggaaaatgtacaaatcctaggtcaagacttttcatatgtaggatacccatatcaccacttctcagatcaggatgtgtgtgtgtgcatacgtatgtttaaacgactatatgcttgtcacacacatccacatcccccaacccacacccccatatatcctaatctttattagctgcagcatgagataaccaaagtgaagttattggaggaaaggtgggtgatgaagattagattaaagcagcaatggccctgaatgaaacgctaaggagtttggactttttctagtaggagcttgctcctcaaggtattgtccaaggaccagcagcatcactgaggagcttgttagagatgccagatcttgggctccacctgatctactgcctccgactctctgggatgaggctcagccatctgtgttttcacaaacttgccagggatttctgtgcacactcaagtttgagaagcatgacagtagaccacagatcctgagaacataaaccagtagtgctaccaaagtttgcacaagaaaagaggaattttaagtggtgttaatagatactttgcacagaagtgaaatgctgaactaaacacagttagacacttttctttaccatgacattctcagaacccagagtatcctgatatagattgtgaatcccctaaagggagttatagtggaatctttttttttctttcttagtattttttataagaaccaagggaggaattaatattgcttggaactttggagacacatcatggtgggcagtgacaaggcagagaaagcttttcattaggagaggaatggagtagcatgatgaaagcagtgctctgcgaataatcacgtagaggcatgcaggtttagaagactggcctggttagggatagggactgcgaaagaaggaaatgattaacttggacaccactggggaggctctggagttttccagagcagctggaaagagagttctgagcagctggattagaatggtgattctgagaagtatggaggtatggctgttgtaggaagaactaggtgcctatggatatagtgccagcatatactgttttaacattgaactctgaaggagttctgttgtcacttcaatacaagcaaacatctcatggcccatgaacatggtttcggaaagaaatagtcctttgccaacagcctgaggttactgcctggtcagtgggtgcaggctgctgcacaggtgtgcactgtggaggaggaagtggagttgacccccccccgagggacaccttatccatatgtgggtgtcatccttcagcacagcaggaacactggtgaacagcatagcctttgatttccaaatccagtcttatcatttgagtcctttctgatatcacgctgtcaccaggcaaggccacctttctgggtggctgctgtgttgactgattttgatactgcaatacctgtgtctgtgattttccagagcataaaaggaaagtgggcattgttaacagttcctcatgactgaggcttttagtacaattttccatgctgtaaataaatgatgttactcaaagacaattaggttatatttgagaaactttctgatttgtatcaaaaagtaccctcctgtgcctctggatagccaattgggctggacctatgttgaataattattcagtttggaaagtataacattttagattttttaataagagtaatgtatgcacatgtaatgagatagatcaattcctgcatctccacttaattttttggaggcgatcactatagccgtttctgtttttaattcttatggtggtcattgctgtaatctaagttaaatcttcagtcttccagtactcagttgatcagttttaatattagctattgacttacttaatgaataaagatttatataaactacaatcttgattttttgatacttaccttactatttatagttctttctgtggcccgtgttagtttaaatagcatttttctgtatcttattcctctaacatttgaaggtctgtcttgactccttaccctgtaagatggtggtatttgctccactatcctctcttgaactttcttccttccactcccacttcttaacagtcctcttttacgttgtcaagtatccaagcattttctttgtcttattttttcatatcttacatcatgatagctttcccatgtcagtatagattgcattataaactggatttcaatggatatatcctgtaggggagaaaaagcagtatcttttccacacccatctcacagttcatggctgacccctataacaaagacagattagcaagagaaaaacgtaacaaatttatttaaccaaacctttctgtgatacaggagtctttggaaatgaatgcccaagtatccagggaaaactgtatttttgtggacagttgtgctcaagtatgattgaaggatggaagggtacgctatcatcgtatgtattagtcagggttctctagagggacagaactaacaggacagatgtatatataaaggggagtttattaaagagtattgactcacacagtcacaagatgaagtcccacagtaggccatctgcaagctgaggagcaaggaagccagtctgagtctcaaaacctcaaaagtagggaagctgacagtgcagtcttcagtctgtggccaaaggcctcagagcccccggcaaaccacagtgtcagtccaagagtccaaaagctgaagaacttggagtccagtgttcaagggcaggaagcatctagcacaggagaaagatgaaggctggaagactcgcaagtctgctcttccatcttctcttgcctgctttattctagctgcgctggcagctgattagatggtgcctgcccagattgagggtgggtctgcctctcccagtccactgactcaaatgttaatctcgtttggcaaaaccctcacagacacactgaggtacaatactttgcatccttcaatccagtcaagttgacactcagtattaaccatcacatagtaataaactggggtgaactcagcaaggcctatttgttcagattcttcttggtgtctgtacagaggagtagccctctggaatgagggtcttatgacctactttcaggggaggtaggccgaagaattttttttatgaccatgcttcaagggagagaaatgagagaggattagagagtgacctccaggtgccatattttggggtagtgtgttctgagcccaataatgatacctagtgttaagtaggtctcataatttttgtaactatattatttctctctgctcaccttctgcccagttttccctttcattctctctgtaaccatcgtatattgtaaataactttacaacttcagccttctagcctgtgaattttcctaactattattgtgttattgtgttctgtgctgtgtctgagcttgattttttcctgctattccctgcgccagctccaagccatgcccacttcagttccctctgggcatattctggtctgtagcattccctgccttggtctctgattgcacatttgtccttgcttttttgtctttatcttctattcttgtttgttcttgaccctttctcttctctttggttatctgtcagttctctttgttattccctttcatttgattggggggttgggaggatgagagggaaaggagagagggggagatgagtaacaaacacagaagttcagtccaacaaccctggccacttaggtaaaccgttgtctgctctgatggatcatggtacacaccagaactttgttactgcatttcctggtggtagcagagatctcaattgtttgatttgcagaaatcctatctaatacattgaatcagtcatatttcttcttcaattctctgtctccaatggtttagaaggaaagataagacctatggaaggaatatttaggctcagttttctttgaaatgtatgcaaaactggaagtaaatgaaaaattaatttgtggtgggtttaggtttattgcttaactacaaaggaaatgcttacttgaatgaaggcttctctgatttctttgttaccagtaatgattttatggctggggtaaatactgttacctttctcccctttctctatttatcttgcccatttacacacctcccttgtacttcctgctgtcagagaagctgaaatcagcaaatctgtctgtagatcattttcttttattcctctgatggcaaaatggtaacaacagaggcatgcatgcatacacacacacacacacacacacacacacactcactcactccaaaccacacaagagaaaccaatgaaccaaaagcagaatgggaaacaaaattggcaaagcataaaagaaaaggaaatgaaagaaatgtgataattgttgaccaacactgaatataattttccaagtcaggatacttgtgtgatgaatcaccagatgcattcaagattatgtctagagtagcaatggaaataggaggctttaagccaagggtataacctgcaggagccaaaataaggagagctccttccctagagagcaggtcatgggaaggcaggcaggagccttgacaaagtcagtagaatcagagaatggagctgaagcatgaccagaatgtcagcataatcaactctccagaaccttggtttatgacaataaacatttatttttggtcacaaattaatgggtcagctaggctttttttgctggtttggattaggctcatttgggcttactcatgcatctgtggtcagctagtgggtcagttgggggctggccaattttggatcacctctgttgggacaactcagctctgttccatgtggcctctcagcctctatcaggttagcctgggcttgtttgaggcatctgaacaaggttccaagagaaggagcagaagcatgcaaggccttgggaagtctacatttggaactgcaggtgcaggtgctgttttctcattctgttggccaaaacaagtcccaaggtgaaccgtagagtcagaatgggaagagatgtcaaagttacaggacaaaggccaagcatacagggaggttattaaatggaggcatcaaagcagtctgccgcaagctgggcagttattgagtcagattcatgggtatggtagactccccagtgctcgcagagtggaggaagttcagagaataaaacagaaagagtcattatgaagagatcagctttaaagaaggggatttgggatagaaaacctcacaggctccttcctaataacaaggggcaagttccttcagggcaaatgaaaacaaagggatggctcctttgtcccttgacaagcttgcctcagggtgataattcatgtgagcaataaaggggaccatttcatctgggggaatctaaccaatataagcaatggctggaccttcttaaatttaggcattttctgatttactaatagggttgagataaggggccctgaatgtccaatggacacagatgagactctcatgcccttctcttggcttaggctgtttagctggggattttacaggattggaggtgcctctttcttgtgctttaccctaaatcagggaattagagtagtggttttcaaagtgtggaccctggatgagcagtatccatgtcacctgacaacttgttagaaatgcagattctcaggctcaccccagacccatggaatcagaaactgtaggagtgggatctaggcatctgcgagttaacagccctccccaggtgatgttgatgcgtgctcaatttggaggcagctgaattagggttctgtgtggtattgatgggttcaaagcccatcaaagaagtggaatggatagatggatttagcaaataaaaaatacaggacatccagctatatttgaatttcagatcatcaacaagtaaattttttagtgtaagtatgttccatgtaatatttgggatgtacttttaatactaaaacattatttgttgttgatctgagaaccaaacataacccaatgttctgtattttacctggcagccttggaaagaggtatagaaaaactgcagaaagttcaaagaacatcaagattgttaatagaatagaaattctagagagaaaggttaaagaaattaacttgatgaacccagagagtacagcactggtgggattaataggttggaggattttatttaaagggaatgctgctgagctgttcttcatgaatgcccaaattaatcgagaagaaatttattttagaaaaaggcaagacttcctgccaataaatgacttcagtgggggttctgaatgattctgtgattctcaaaggaggtcagatccatttgggatttcatgggattgcatccagccaatactccaatttgtgtttgtgaaagagcagtttagagaggcatttgccaacaggaggttggagcaggtgatttctcaaggctcttgatgacttctctgtttgaagctgcaattttttgcatccttcttttttgaaaagcgcatagccttttgattatttttcaaatccgaatgtatctggaagtttggttttttaaaacgtggatataaaggggaggcagcaaagcagaggtgttaataggatgctttaaaaccagaccgcatggattcaaatcccagctgtgccacttcctagcctcctgcaacctttggttagtttgtgcctcaaatttctcatctgtaaaatgggaattattgtgaactactcattattatctcataggtaactgtgaggtttaattgagcttattcatgtaaaatataagaattgtgcctagaacatggttagccttcatgaaaagttattttatattattaaggactagagtctctttgtatatcctggacattcagaggttgttatggccagaagccattggtgaatggtcagtcctatgacatgtatggtagaagcattgtcccttgtgagcagtaatgtcctgtccctctccctgatccctaatcttgaggtgttggttaagcttagagtgatgttattctgtggtcgtattgctgcatcctaatcatgaatcatttctctttctctactcagatgaactttcccacattttctagaaacccccaagataattgggtttcatttcccattgcatgttgaattcaattaaaaagctgtaagagaataccatataatgtggctgagaatataatgacatttccaaaatattttttaaggaacttgaactctaaatcaatttagttctgctagtaaggacagagatttagtcatggaaaaatattaatctgatgactagtttttatcaaaattaaggatcaattatgactagttactttcagaaacttagttttggagatgaaaacaagtgatttgttttctgaactcctgcagggaacaaaaaaaaggtaatattggccccatacaatacataatttctgtctacgtgtgattgaagtgtcaaatgataaatcccaatcccctgttagaaacaacagtttagtcagtctgttcaggactttactgtatgtacttgatgatcagttaagtaaagagtgtttaggtggactttttttgttgttttgctgaaaagtttaagtttgttctttaaatgaagttcccttttgaatttgcaataaatagtaggcacccaattttgcagtgcttgaattctgatagtaaatagtgatggttgttatttttcttttattaaagaaaatgcagtataatgcctacatcatggcttaaaatattaagtatttagtcttcttcttgagtctgtgaacgctgggcagttctgagcaagtggaccaggcttgactgatctcagctatgctcatgtgtatgtctgtcagctgacatgttggctggtggctgtctgggcaagagcagccttctccttcacacctctgggagttggccagttgtaggttgaggatgggacaactgtgccatgtgccgcttatcatccagaaggctagcccagcctgttcatatggtggaggcaggagttcaggagttcaagagagacagagaaagagactggaagtaggcaaagtctcttgagagctaaactgggaattggcaccaagtcacttctgctgcattctgttggccaaaggaagtcccaaggtcagtccagaattttggggagtgaggaaatagattccacttcttgatgggaagaaccacagtatcacaagacaaaggtgtttgggggtaggccaaaaaagggctcacaaaatccatgtcaaatccctggaatctgtgaatgttaccttctatggcaaaagatgtgattaagttaaggattttgaggggaagagtttatcctggataaacagataggccctgccctaaatttagtcacatgcatctctacaaaagagaggcagaagaagtctgagtgagacccacaaagaggagagggtgatattaagatggaggcagagataggactgaagcaacctcaagccaaggaatgcttccaccagcagaagttggaagaggcaagaaatggagtctccccctagaacctctgtagggagtatggccatgccagcaccttggttttgtacttttggtctacagaaccaagaggcaataaatatctggtgggttttttttttttccagcctcccgagtagctgggactccaggcacatgccacatgtcctgctaatttttgtatttttagtaaagacagggtttcactatattggccaggctggtctcgaactcatgacctcgtgatccatccgcctcagcctcccaaagtgctaggattacaggtgtgagccacagcacacggccaatatctgctgtttttaagctgtctagttggtggtaatttgttaaagcagcccgagaaaactgatacaggtgtggatacagggagggataaagaattgaagacatttttgcaacaatctacatataccataaacttagataattttatatagctctttttcacttaatatgacaaaacatttattcatgttattacagtactgttaaacactattttgaataattgtataatacatactatatactgagttgatctagctgaacattttattgttattgacaattccttccatttttctgatgaagccctgtgcataaaaaaacataatctctatgctctgaatcaccattcagtttctcccttaccactatacataccttcaatggcaaaaaccacaattacttttgcaccaacctaatagttctgggaattgttataaccgccctgtgaatggtctcactctccctccagcagatgtacaaacccagctataccagatttgttttctgatgaaaaacacagttcaagttagctaaaaactttcaaagtttgctttcaaatattagttctttaatccaacacttaatactcctgtggtaatgttgtctaagtacaattgtcatatagcactttttttttttggtaaggctttggcatcttgaggacagcactgcttttttcaactttgtgtatcctaacatcgtctgccttggtgttttggaggtatgggtcactctgctatctgctgcatgatgagtgaataaaggagttaaaaaagggaaacatacttataattgtcttctcttgtcatatatgatcccagttattcaatatgactggatttgaactcgactgggtaaattgccttgttttagttgcttaggggagtcttaatattttcataccattgacccatttggcatctggagaagccttctcagaatagtgtttattaatacctagaacaaaacatataggattaccaaagaaatcagttgtattgcacaatagttcaaagtattatgaattgcaatatagtaactgtgtgcatctttatattaatacataaaataatatatagcattaggcctcttagttactattatttcaaagtagtgatgacagtacccagcatattaagatacttcaacatcataatgtgatattaagatatctgtgttttttattggtggcagaatcacagatctttttagtactactgtagtttgttgccaatgcccataattgaagaaaactctgcattttaatgagaggtagtataaatgaaattgtaactttgttttcattttagttcatgaattacctgaattctgtagaccgcaggttgagcacctgaaaagcttttttagaaatagctctagcctctgttttccccagttgtcatcacataagtttgattaaatattttgagtagtttatgaagttatgggtaggcaagacatttctgaacacttgcatgtataacatagcacctaagatattgtagacattatgtaaactctttttgaataaaaatacaaccctcttcaagtgcagatggaaaataaaaactcactcacttggacacatttctgttactaaccttcctgggtagttgttttgttaagtttagttgtttagttgaatcctttccctgttggtactaaattgataagttgcttgcatatagtgtagtctatgaataattctctttgatttttatttgttgagtttgttcccacttccaaaggggcttgaggtagattgggttctgaaacaaagtgcagaatagagcaattatgtaaacatagatttcctggaggtcctgaggaggcaggtgctccaggcacctggtgatctgatttccactcttgggcattgcactctggtctgatttctgtaggtggagataaaatgggaaacatttaatgcagcctccatttcctctcaatagaaattatacaaaaatattttttatttcttaaaaaacatttttctttcaaatttaaatagcctgtaatacctttcttcattttacaaagccccgacttacagcagcataatatttattaatagagttaagcagaatcaatgcatgtgtcctgtcacactgagaactgtagtattgtggacaatgtttctaatgtattgtgatcggttagctctcatgagaataagatgaatgtttatattacatatatattatatatctccatctatacccattactatatctgtgtatatatatgtatatatacgtatatacacataacatcgaaagtatgtgtatgtgtgtttatccatgtactgtgattaatactcatgtacaatgatgttcacttgaacgccagcatttttttatgtggttgatctttgcatttttctgtcttcaggccatctaaatcctctgactttgaggttttttgatttggttgaaactaataccaaaattggaaatcttttattacaccaggttaactcaaagagtttcttaatatgggataaagggatagtttgtaagattaggaataaatgtgataatcacttgaagttcctggagcatacatagtgttttgattattaattttggcatcgcttaaacatgttagaaataaaaagggccagcagccttttgtgtcagattaacttagtaaaaattacataaagagtttgcattatttatttctgttttctgtttcattgagtggaaaatttaaatctgacctactgactcttttaacacactgagaactatgtatttatttctaatttattgagtgtcagaaatatgtcttcaaattccctaaggctcaacttcaaggcaggttcctttatgaggttttctctcatcccctgcattaatttcctattgttgctctagaaaatcctcacaaatttagtgacttaaaacaacacaagtttattttcttataattctggaagtcagaagtccaaaatcactgggctaaaatcaagggctaaaatcaaggggctggcagagctgctttcctttctgggggctcctgagggggaccctttccttccatttccagcttctagcagttgcctgctttccttggcgtgtagctcccttctatcttcaaaaccatcaagtctttcttacaatgtcatctctctgtttcttactcttactcttcctttccccctgtttaaggacttttgtacctttgtgattccattgagtccacgtggataatctgggataatctctttattttaaggtcagttgattcagttgattagcattttaatgccagcttttttttttaattttattattattatactttaagttttagggtacatgtgcacaacacgcaggtttgttacgtatgtatacatgtgccatgttggtgtgctgcacccatttttgagacaaggtatctctctgtcgcctaggctggtgtgtagtggcacaatcacaggtcactgtggcctctaactcctgggctcaagggatcttcccacctcagcctcccaagtagctgggacatcaggtgtgtgccaccatgcccaactaatttttatttttttaaattttctgtagagacagggccttgctatgttgcccaggctggtctcgagctcctggcttcaagcgtcagtctcccaaagtgttgagattacaggcatgagccaccatgcctggcctcttaatgccatttttcatcttaattctcctttgtgatataacctaacatagtcacaggctctgggcattaggaaatggctgtctttagggaggtatcattctgcctatcacatcccctaaaccagaaatgatctatgtgtctttcataaggtgttagggaaacactatctcaacgtgctattattcacgtgcatgctttatctctcctttataatttaacctatgggaaagacaggaccctgtctatattatatttatgttctcctcagtatatagcaacactgaaagaaccaggtaaatattttttgagcaaatgaatgattctgtatccaaggaatgcattagttataagggagagaggtcagctatagaaagagagaaaaagaaaaaaggcagaaattgacagactattatcagcactactcataagagaatagtgtcttcatatgcaccattgcctctaagcagcaaataatttaacttgttaaagttatgatccacttaagagttatcctattctgtctcactataaatcagtattttggcacaaaaaaatccttcagccttgtgttggcttactaagaataagttccttgaagccttgcaagctctgggcatcctacctttatgaaagtgacggacacactctgtgatggatgccctgtgcagagagacctattgggtagccagcctgcacctgtcaggtggtacccacaaaccttccttaaactctgtgagctttacagcattaaaacacttctaaacacatgcagcttttctatgaagcactcttaagaacaaaggacagtgaatgaattcccctaagatgttcagaaagccaagatttcccccaagtattaccttaagactgcatatgagttatatattttactcccatgatgcatttgtatagttctaaatacataaaaattgtttgtttgttacacatccaggaagtgtccttttgagatgtgtgagcacatattcttaccatagttctgtaacgtaggcaggcattatttgcctgtcttgcaggtgagggattcaactcacagaatggaagtggcatgcccatcatcacatatctggtatgtgatgtgtgcaacacagtgagtaatgaatctagattacttcacctcaaactccatgcttattacacatttagtacctcacaaactacatctcatgtggcatcatgatttgtaggccatcaggtgttctgttaacttatgaactgaataatgcagcattttctaaaatgtgttccatgtcacattactccagtaatattctctgtgaagagttttgtaatcaacaatactttcagaattaaagagtgtgttagtatagtagtgactatgcatgtccaacagagaaatgtgttttaactttgtttttaccccagtgtcttccaaactgatatagccacagaacccttgctttctgccctcttgctattatctgttgggcaagggacaaatttctaggtcctggatccccagttgctcagtcatgattatgcatccagccatggtgtgcaaattgagctgttgttaatgggcaaaggttggctttgccacctggttttgttaggagagctttcaacagcaagaactagaatacctaagtcattttgtttgagcccttgctaatgaaagtgtggtcctcatatcggctgcatagatgtcacctgggagcttattagaaatttaggatttcagtccccatccttgattttgtgaaagggaatctgcatttgaacaaaatctccaggtaattcatatgtagtgtaacatttaaaaagcactgattttaaccataagaacaattattttttatctaacaagaaatactgaggtgaagcgttctattttattggcaactcggtagtggcatcaaggacctggatgcttgtctcctcatggtggtaaaatggctgccaaagctccatacgttatctcttcccccagctgcatttaatttcaggatggaaagaggcagaggcaaaggactttgttcttatgtggctccctttttttactaacttcttgctcagaaggtcacttgcagccttccccttagttcttacccattagatggattactggcaataataaatgactggcaataataaagacctcaattccctttgatcttgaccaatgttgtttaaaaaatacataatgctagccacatacataatttaacatttcctaatggccatattttttgagaaagcaaaaagaaaacaggttaattttaattatatattttattaaccaatatattcatactattatcatttccacatgtacccaatatataaaaattgtcagcgagatattttataatctgtttcttcaaagtctttgaaattaagtctgtattttatgcctatagcacgtctcaattcagatactaaatgttcatcagatattcttgatctgtatttagatctcataaaagtcacaattaaaagtgttcataaacctaagttgttccatgtaataattaaccagtaaccaaatcagtagcagattttaaatgtaaatgcaaattaataaaaattaaaataaattgaaaactgggtccatcacatttcacatgttcggtagccacatgtggctagtagctatcatatgagacactgcaagtataggtcctcactactcaaagtgtggtccaaggaccagcaatgtcagcatcatctgcgagcttgttagaactgctaaatcttgggtcctatgctagagctacgaaatcaaaatttacattttattttaatgcatattaaagtttgagaaattctagtctaagctgttctcaatcttggctctaatttagatttaatgtgggaactttagaaaatactgttgcctgcaccctatcccagaaccttggaatcagactttctgtagtggggtacaggcattcatttttttaattgaagctttctaggttattctaggatgcagctgtgatggtaaattttatatgtcaacttgactgggctaagggatatcagatagctagtaaaatattctgcatatgtcaatgaggatgtttcaggaagaaattagtaaagaagattgccctcatcaatggagctgggcttcatcatccagtctggggaagggctgaatagaacagaaaagcagaggaagggtgtgaatttgctctctctgcttgagctgagacatccatttcctcctgtctttggatcctgaagctcctggttctcaggcctttgcacttagattggtacctacacaaccttggcttccctcgtttttaggccttctggtttagacaggagtgacaccactggctttcatgggcctccacttacagacagaagattgtgggacttctcagcctccgtgatcatgtgagccaatcagtctcttgtaatacatctgtctgtgtctctctgcatatcctttcattctgtttctctggaaagccctggtaaatgcagctgctaagtttgagaaccactagcctagactaatcctgatccatcatctccaatcagacacactgtagcctaagcagtactatggtagaagctctcgggtgagtaaccaactgtgacttccccactgggttttgcttccctctggcctgtgcacatttccagcagagcaagggatccgactagaatcagctatacttgctggagttgcacattcttggtctttgtccattcactcactggctaactccttcctctccttgcctgtcagcagtttcctcattcttcaccttcctcgttctccaggtagcaaacaaggtagggctcctgctctgtgctgatacctactcagacccaatctggaaggccatcagtgactgccagtttctttcagctcctcatccccactcttgccccagtgaaaatgggtttcccttccctgttgccctgttcccgtctctttttccacttctagatggcatcttgcacacttccagtctttgtttccttcaggtgctcataattctgcagtcattttgcttattatgttttgcctctttgttgatgataagctcaaatgaggtatgcataaagtctgttcatagaaagcagctctgaatctgtgaggccaaacttagatgtgatttaatgaccatatttgggtacactggaagctgcccatgttcacttcccaggtttcctgaagatttagaaggtgcacatacctcaaaacataggcttgcaaatttacgtgcctctattgccagctggatctgctgggtttctctttggagaagggaattttagcaggacacacatgaaaaaataagtgctcctctgttaggaatcttcaactgagaaggtgccatcagtgcaaacaaagccatgttagagcaaaagtatgtttggtctgcccagctctaatagatgatgttcatgtcccttgggctcaagaacaaaggaactgcctgacagtcttttgaaatctcacctgtttcttggtagagaagcttctgtgcagtatacatttccatgataagtaactgctgtcaaatctaataagaagactaatctaaaatttaggctgtataaaagttaggctgtgtaataaataaaataaccggattatattaaaaaataactgtttttatttgaagactgagcacttggagaaatataggagttagccaacaaaatcaattcttcagcttacatttgaaaatgaagttcctgttttaagtgtataaatcctatgataaaaatgtctcagcctagaaaatgcaatttttgaaatgtaaagttttgatgtaggattaaaaatgttattgtcttggccgggcgtggtggctcatgcctgtaaccccagcacttcgggaggccaaggcaggtggaccacttgaggcccctaggagttcgagaccagcctgggcaacatggtgaaactctgtctctactaaaaatacaaaagttagccaggcttggtgttgcatgcctgtaatcccagcttcttcggaggctgagacacaggaatctcttgaatctgggagttggaggttgcagtgagctgagatcgtgccactgtactccagtctgggcaacggagcaaaactctgtctcaaaaaataaaaataaaaaaaattgtcttatcacatttacataattattctctaatatttatattgcaataaaaatgaatctggtaaaattcccttgaaatgtggggatgtttattgcaaatggtccaatggcttttcggagaagctccttgagaaatatccatatgattcaaattatgtgcagaacagcaaagtagtaaaagtatactatcaactttctagtattagaattaagaaatgtcaagaagaaccacctcaaattttggaaggccagagaaattttgattcttctgcaatcactctagtcagtaaaagagataaaccaaataataataataaatacacatatctagtaaaatatatatttatacctgctcatatagtgaagtatatctaatttatccaatactatagataagacatggatgtgttgtaccttgccctgttaatggtgcgctcaccaataatctcatcatcctctatggccctaggcagagttcctaatacttttgtttcatttgacagatttgaaaacactcagagaaaagcagtatatacccaaagtcataagaattgtaagattcaaagtcattcttcttgttagcttctgttcttttcactgcagtatgctgcctctttattccttgaggccctcagccaataggattttgtaggcgtgctgggcttttagacattaaagaactagccattgagttgaacattccatggtggattaaaccagcctaattaacttgtctctcctctctactacaggtcttcagtcttttttttttctttattctggaagcagtaaaactttgaacttagtttttttttttttttgtaagtttagcataaatttaatggcaaaatcatgcccaaaccaacagatggtaatatataatctttatttatcccacttagagtgaatagccatagatttcactccataaatacctatgtatttgataaggatccacaaacattttctgtaaatggccagatagtgattattttaggccttgtggaccataccatctctgttgcagctactcaactctgcattcgtagcatgaaagcagacatagatagtacataaatgaagttgtggctgagtgcaaataagtctttatttgcaaaaataggtggcaggctggacttggcccattgaccatagtttgtcaactgcctagactaaaaggtgatactcagatctgttgggactattgcataacatatatatatatatacacacaccatattacctttctgaattctgaaatatttcagacttgaagagtgtttagtaagggatcaagagtgtgtacctaagatttaaaggaagttttataaaggagaaagtcatctctattatggtcaagcattaaagttctcgtatacatatgtctggaggggcaactaaggttcagatattgctagtgcgttaatcaggaatgagttttgtgaacagcaaagcattggaacacatagcttctttgttgtcccttgtaacaagatcagaggtaggcagtccagagctggttcaagagctaagtgattccctcagggatccagactctgtccatgtttattctccagcatccttagttgatgagccttcaccctgatgctcattgtctcatggttgcgagatacatcctgtacctccagtgtcaaatgcacactcccagcaaggagaaaaaaagaaagcagggagaattgtctctcttagagaagtagaaacttacccctgcaaatctcgacattcctcttgtcggctaaacaaggttacaaggctactcctaattgtaaggaagactcaggaagcaagtatttttagttggattcattttcatcaccctgtaaaaacaggagaaaggatgttgggtgggcaagttgcacaccatctgctgaggcatctgttcttgtttggtggctgttatatttcgttacagatacttaacatcatattgtcttctcccttgaggaacatatctttttaagtatccccagtgttagcagcttgttttccatctgagttggaaaattaaataacattattcacatttttatgtaaatgttgtataatgtgcatatataattacttgagaatggttttcttcagaaatacattttcctattttcctgaggattttagttttggaggactttgtttacatgtgactctagtatgctgagtagcaaggcttgagggaagagtgaagttgacataaatggaaggcaacttgcacattgaggtttgtgggcaagtgattgttctcatggaggatgattccatctaagagcaagattttatgaactcagagaatcttaagaagaaacagttactcagtaactttcttaaaatatagatctgatacaggtatgagagaagagcaattaaataggcacacagagatcattttagttcttaacttgaatatcttgggatacttcctttcctcctagaggtagtatttattctgtttctggaaacagggcatgtaacttgctctttctttggtgtagactaccataataagaaaggatggaggtaactgcatgattttaattgtgtctttttgctttagtagaatgtcctaaaatgacacaagtgagaatagtgtgaaaataaatacattcatttattggttaagctttaaatgtgagtgaaattttcttcaactaattataatactaaattaattctagaatctgtttcaatgtagccatataattatgtagaactataaccctttattgcccagataaatcttgaccctgaaataatgtacgatagaccctcatctgctataattctgaaaactgcagtaagaaagccaaattttaatccaaatgtttcatggttctttgggcttccaagatgacaggctcatcaaaaactattcctgacttggccagaaatggaaagatcttcattttgatgggtacaaatgaagaagccacatagatacatatttggaccaagattccttccttttggcttcgagatctttcactaacaggactgaacgaaccagaatcaacagtattgggaaaagtagataactaaaatataaattttaacatgaacaaatttaccaactgattcagaagaaacagaaatcagagaagagatggaactttaaaataaatttaaattttatcagggagttgtggacagactcctatgaaaaggaggacttcaagagcaagaagggattcttggaaattaagtctgattgttgacttttaaaaacagcatattagctgaaagaaaagatgcagaacttttctagaaaacagaacaaagaaccaagagttggaaaaaaaaattaatgaaagtggagacattagagaatcattccacgtggtcctacatcttctaatagaggggaaaaaaagtggaggaaataaagatgcgcacacacacagatgttttaatttagcattggatcatcatctcccctgggcagcatgtcttttaaagtatctctagtgttagcagcttgttttccatctgagttggaaaattaaataacattattcacatttttatgtaaatgttagataatatgcatgtataatcacttgataagtgataagaaaaagaatttgagtggaccagtaactaaacacattttcacgatatttcagaatagcaaggaaaaggagaggatgttaaaagagtccagaaatgggagtggggtggaaagttgaccacaaagataatttctaggccgggcatggtgactcatgcctataatcccagcacttcgtgaggccgaggtgggtggatcatgaagtcaggagttcaagaccatcctggccaacatggtgaaaccccgtctctactaaaaataccaaaattagccgggtgtggtggcgtgtgcctgtagtctcagctactcaggatgctgaggcaggagaatcgcttgaactcgggaggcggaggttgcagtgagccaagatcccgccaatgcactccagcctgggtgacagagctagacttcctctcaaaaaaaaaaaaaaaaaaaaaagataatttctagaggactagaggacaagggaatgacttcatggtttggaggtaaaattattctgaacctgcaattttgttctcagacatactgcacatttaccaggaaggtgaaataaacacattttcagacaagtaagatctacattatttgatcaccccagatcattcctaaaagaattaatgcagtgtaagctcaataaaacaaaagaaggaaatatgggtttcgagaccaggtggaaaaactagaccaaggaatgcaataaaaaaaatctaagacaatagttatttggcaaatcttttaaagcagaacaaaaagttggcaaaattacaataggatttttggggaactcagaaatcctaaaagcaaatgacatttccctaacaggaagtgtgatgaaatggaatggtctgagtgagtggatgtagtttatactgtttaagagggctccttcttctcagtttttctttgttaatgttttttgagcagcacaactttagtgataatattgcatggctttctctctgcatttatacttaccacttgtttctgcagagaacaattatgtaattttcatattgtaaatgttattcatccaattttaaaaacgtgtaaaaaatagatagtacagaacatgatatcaccttgacaaagtaaaagtaataattaatggagaaaggttgggaagtagaaaggggaaaagaaatgaagagaaatacagggactctaatctgttattttacagagagaggatttaagagaaactcagtttggtgaattaagaaagagaggtttaaatacaaggctgtaaaagtcaattaaaaaacgaaatattgaaataaaactggcagagatggagagaaggagggaatggcatactgtggagttaaatgataatttctcagtaaacaaatcaagaaatagaggtttgagcatattatctaaagatacactcttcaacccagcatcccaaccatgtgtggttattgagccactgaaaggcagctagtccaaattgagataggctctaagtataaaatatatacccaacttttcaagacttagtatgaaaaaaaagaatgtagaatacttcaataatttttatattgattacatgaattgataatattttggatgtatttggttaaataacatttaatttattaatattaattttaccatttaaaattgttcttaatattactactagaaaatgtaaaatcacaaatgtgacttacactatacttttactgagcagtccctgatctagagatttggaggtacatttgaagaatggaaattagaaatgatttatgtgttcataccatcccagaagtggaccagggtgcaatgggaaaggaagagcctttatattatattttatatgttttagaaaattttcatactaaacactgagcagtttcaaagggctatttgtaaagtatatgaaaagcatgaggaatactatgacaacaaacacccttagtcaccacccagtttaagaaaaaataaataaaataccatagactttgaatgcatttcctccttctacttcaggctagtgtactgttttgattttcattttcttaataaacatagttattctctttttgtaaaaagtttctaattgaaggatatcttgtgtagttttttggcaggggttgttgaataatttgtcagtattaaattttagaatgtgtgtgccatttgatggcacagtggttccctttgagaaatgtattctgtatgttttgaaaaatgcagactgcaaaaaaatgtatagagtgacatcatgttaatttttaaaagcatgtatgtttatataattgtatagttatagatctacatatacatgtatatgctgacattgatgtatacatttacttgatatatatgtgtgtatatatgagcttatgcatatataataactaggactagtgcttgtgtctcagaagtcttattggattggcagaggagggaacttcatattcttgttttataaattttcagagagagagatgatcatagaattatgattttatttacttagatttgttcattttctgtatttttcaagtaaaaatcccttaaagaaataaaatacatgttgaaatatgttctagccccggagactatcttagaacagaacacattgccttagaaggtaagaagcaatatgtttacaaatgaaaaagaggctaagttgcatgaaagtattaaagccattatttttcttctctcccaccctaagtatattagtccaagaggcaagtgttcgcactttcaaagcaatactaaaattgattctttatcccatcctttcagtctaagacacttttaaagaaaccaccagtcttcctccagtgtgcttcattttctaacacagtgtaagaagcatgtgagcagatcacattaatgtaatgatgtgtgcttccagcaggacaatcaaagcaaaggggatgcatgaatctctctttttttttttaatttgctgagtgtagaccatgtataatttttgttaatgtttacttcttctctaatcatatatgtgcgtgtgcattgaaaagattttaggaaattcaaattccaaacaagaaattaaatacttacagtaattctgccatccagatataaacactaataatattttgttgtatttatttctagaatgtctagacatatacatataaccatttttaaaacttaggaaatatgctgtgcatatgattgtttttctcatagaatattgtgagtgctgtttcatggcattgaatgttcttcataagcatagttttaatgactgaattagatcattttagagaaatcaattaaaaatattctaagagtttaaattgggaatgaatatatctttgtggtgaggactgaacatacttcttcttttacttgactttgagtatgtaattgatttcataagtaaaaagataatgaaatgtttaccttgtcataatcaatagtgatttcctaagctgttaatgttaggtgaatggaagtcttcccctgtggatatggaagacatatccaaggacacattgttaatgagaacagactggctgtgcacttcgatactctccaataagtgaaaaaacagaaacttcattaatgaaaaatgacatggagctatatacccttgcattttaagacaaagatgaatctatattctgtccttgtctcaaggaggcagaaggttgcagattccttttggctgtgttgtttacctttaactaatgactcatttggcataaaccagcattatcaaggtgaattccacctgatccaagtctaatacatgtcatacaagacaggataaggtgatcattctggaaagtgggaatttggaattgtgtcttctatcgtcagttgaatgaatgggataggctgagctggaggaggaatgattcttttgggatatggggacccaagaacgagtgccatctgagaaccattaactttttttaaaaagtggaagatcagagacattcacaaggactataataagaaagagtatgatagctcaacatgagagaatagatgaggtagtcaggtgagtaggtgagtgagcgagtgagtgagtgagtgagagagagagagagaagagggcggaatttataaagagcatagctcccacctcctggatgccttctgcaggccagccacttgtctcccatgggttgggaagggagttacctgcaaaaggaagagcatggaggatgaggcaggatttcttttcacttggcatgtaaggatgatgagactggaggagtaggaaggaaggaagtagcttgaggtaaacagagttttaataatagaggagtttgaagagttgacactgtctggcattccatgaggaaacgaagactccttgtaaatgacttgcagaaggttacatggtttttcacaggaagctccaggaagctgcctggtactgttggatatggacatgaactatttattcctctaagatcctgacatctgagacaaagccaggatgttttatacaactctggactagatgtgttctctgatgaaaagtgaaactgcatcctctttgcattggaatttgcaggcactctctcaagctgctttaagtgagaaaaaggggaacgtattgaaagaacacaaggctgtgtccaggaatctcagagtaagcaggggaggatctaaaaatatgaactggaaagctttaaagaatccaggcagtgattgattttcagcggctctcttatctctgctcttccagtgctgtttttctctgcccttgtttctctgtatacatgaggttgggtgactgtcctagatatttacatgcctatttcaggcagctcttaactagcatccctgaagttcaatcccaaactctcaagagaggaagaagctgatcggctcatgtgctcagctttgagcacatgtccctccttggtccagtcagcactggccaggggcaagatcccagcacaaatatgggtgccatggatagcgttgtggataggggtctgataatacttgtcaaggaagaaaattgtgggctggagttctctaaaattgaccactacctaaaattgaccactaccctatgatatcttagcaggtctgggacaggggacatgatctttcaccatcactgtcttttcttttctaccaacaagaatatctagtcccttgctattgaaagtatggcccatggaccagcagctttagcatcagctgggagcttgttagaaatgcagactctcaggcccttccctaggcctattgtgttagagtcgcgtggtaacaagataccctgataattgtagagcactgacttttgagaaatgctaattagatggaggagagaattaggaaccaacacagaccagggctactgagatggcttcttccacaggtacctgtctccttttatctggcagctaatttgttttggccaagcttcagctaagagctatcccctgccctcactgagctcttatttaaggtgtttctgctagaaacttgagttcaggatgagctggagagagctgcctgtgttcaagagaaagatagtttttgtgtccatcttattgtgtattggtaccaaaggggtgatcagtgggatgaaaaaaggaaagagaaaagcagtaaaggtgttaaaatcatgtccaaaaggcaagtatcagcaagttcatttttaattagttattaccttgaggttacttatattcaatcattatactacacctgttttcacttctgcctctgaaagttttttaacgtctttaaaaaggcatcttttcataaagcttaagctctttgtgggctaaataacaagttttgatttaggagaaattactagataattctgtattaagtctatttagaatacagactccctcaagaaactcaccaggtagaacatctgtggcagcaattcagaaatccatgccattaatatttcggactttgaagtctaaaaagataaatttctgacactctaccttgcaggaactctgttttccttcattttctcttttatactccctaaaaggccctgggaactaatgtgtgtcctacaacctgccattattgttaaatcaatctgcttatttgcaggaacgctttaattatttagtaacctgattggaaaatccatataaattattttcttataaaaatccttactttgtaatagaagtgatcagatggaaataacaagaatttctaattctgtgggcaatcaggtggcctctctcaatggggcccttctgacatgaattcagaactttcatcagtgtttatgttgttggagtagaaatgtatagtttcactggatcatgttggaattgttgaagccaattgctgtaatgcacttgattttttgtgactaaatttctgtatttatcaaaacagtttcattttgtctggaaatgtaatgtccttttcttgaataggcatgtggaagtatttggaaatctttgaagtactgtttctcaacctgagctgcatattggaatcacctggggagctttgacaactactgattcctaggacccatctccagagagtccagagtaattgctctgggtgcagcctggactgtgggatttttaatcccttccctcccctgagattctaatgtgcaaccagtgtcaagagacatcatcctgtcgaccgtttaccaaacaggtgtggatgtgggcagacaggcttgtcaaaatgcgttttcccagatgccatcccaagacaacaaattcattagttttggggcaactccaagaatctgactatttaagcaagtccaagccccattgtgattttgatagaggaggcccttgcaccacatttagaaaccctttcttggagattatttctaaaaagagaatgactgggaccaaaatctgttcagtgttgtagtattagggaccatcagtgagtgattgaggtgtacttgaaaagatgacgaggctggggactgggcgtggtggctcatgtctgcaattccagcactttgggagctcaaggcagatggatcacttgaggtcaggagttcgagaccagcctggccaacgtggcaaaaccccatctctactaaaaatacaaaaattagctgggcatgttgccacacgcctgtaatccctgctactcgggaggctgaggcatgagaatcacttgaaccccggaggtaaaggttgcagtgagccgagactgtgacactgcactccagcctgggcaaaagaacgagactctgtctcaaaaaacagacaaaaaacaaaacaaaaacaagcaaccgatgaccagcagttatgtggtataggggcaagactcctggggtcacaacaaaataatagagttctgattctcacagtgttttcgttaccagttctgtggccctgggtatgacacttaatctttctggtgctgtttcccttcaactccaaaaagagggcttggagaatattaatctcaggtcctctgaagctgccatacttgattattctctgatggtaaaaatcttccattagcataaattcttacagaaacttctagcagtgctgttgatggatgccctgcctcagtgggtcaaaaagcatagtgcctgggcaagcggcagcatggtcatcttgttagaaatgcagattctcaggccccaccacagatttactgaagaagcatcttgggaatgggtcccagctgttttaaccagcccttcaagagatttcgatgcatgctcaaatttgaggagcacgcctctaaaaatagtacttggaaaaaagaaagttgataagtattctttttacctgtggtgaagagaaatcatttgctaaacatataaacatttaagactatttagaaagaaatgttggcaagcagcttcaagtggaaaggtaactgttaagagaaatactgaaatctacagccttgctatacaatgtgtggtctcctgatgggtcaacattgctatctctggagaactgcagaatctctgtctctgccccagatctactgaatgagaatctgcttttttttgttgttgtttgtttgtttgtctgtttttgcttgtatgtttgtttgtttaacaagctcgcttggtaattcatttgcagttaaagtctgagaagcactgttctagataaagatgttaagaccataatgtcagctttctcttacttttgtaatgtgtacctatcagtaaacattactgtgaggtgtcccacctcacacgtctgaaatcaaatccagtaaaaaatttttggccctgtaagttggatccacacctatatcaatttaatagttagtatctgttattttcattgtgttttacctgtttggggcttttaagcctttttaaaaaacattccttatggaaaaaaattgcttaatactgtcgctttctttttccttttcttcctcttttgaaagctgccatttcagtctgactccctatagtacttgaacatttttaaattatttttttctagtgtctgaccacttttctaaaatggaggctgggtagaatattgagggtttgttctgtgggtttgattttatcttgattcattgctacatttctatatttgtgtgggtctcaataaaattataaattagaagattaatgttaaaatgttacaaattataaattaagttaacattaaactgcaaaatgtatgggaaagaatccttaaggatctgcagaagaaccttctaaattaacagagaactagccttgtgcagcagtaccttaggatagagataggcaacctgagatttcacaaatagaacagagcaagtttatgataaaatgggtggaaatggagcacgacatactacgtgtatattcttatgtagcaacttttaaaaataactcttttaatcatttgttccctccaaaacttaggtactctctctagtcacagttcctaggtactgggaaatttattggcttcaaattatgagaagaaaacaacagtattaaagtgattttcattaaatatgtgccaaatatgacatttcttcaaccattttgtcaactaggacattatatcaacttgtaacttaaatcatctttatgacttatctataagctacatttgctgtgtgtgccttcactatgtttgctatgatttggggaatcaagaaaaattcctaaagctaggaatcttagaacactggccttacatggttaattacttcttttcttctgtggttattccatgtctatttttctgtttagaagtagaaattagtcaagctttttaaaataattattatttgtaataaaatatatcataaaagggcagtttttatttgatttttgaggttatttttctctctagaaaatcagttattgacctttttggggggttaaaactcatctgaaaatctcatgaaagctgaagaacctgtgcttagatacatgaaaatatgtagaaaaatatacattttgggctgaagattaaccttcagtgtcagtgctataatttgcatatttgtcccctcctgaatttaagttgaaacttaatctccaatgtggcaatcactttaagatgtgcttgattcatgatggccctgccctcatgatagatttatttgttcatggattaatggagtaatgggttagcatgggagtgggtctgtggcttcagaaaaagagtaggagacacctgaccatggtagcatgcctccctgaggtggcacagggcatcacatggcaaggaggctgagtgtgctaacatggttaggtgtctctttctgtcacttctatagagagtctccaccagcaagaaggccttcaccagatgcagctgcctgacttgggacttctccacctccataactgtaagacataaattccttttctttataaacccagtttcaggtattctattataagcaacagaaaagggactaaggcaatcaattaattcagtaaagacttttttgatgacaaaaacaaactagcaaaattaactagtatgttcaccacaggagttttaagtgagacaaaggtaactttttggttctcattgaacccatggctgggtctagggtcttgatcagtctgatcatacttggtttctttctgtttctctgccatgtcttctgctgtgtttggtttcatatttcagtcattgacagctccaggctgatatcccattattccaaacatagcagaataaagactctaatttcaaagtatctcaagtaaatctcagaactgagcttgtgaatcttgattgcttatatctgggtattttgtccattcctgaaccaagattattccatctccagctgtggtaggtcatagcccaagtcacaatctttcacttttagagtcagtttcacaggaacctcgggaactaacagcaggaaaaggaaggatttctagataaacatcagtgccctcttatccatacaagggggacgatgttaagggggaaagactatcaacatccactgcagaagcagaaatggtgttaagagacaaagactatcagcatccacaaccatgagcaaccactgttttagaggtaaagaaactatataattagcacaggccaactctttttttatttttataatgcccagactacatgcatgtcttaatcatttcttttatataaaatttctgtgcacctaatgagaaggtatttttagctacacatccatgacccttatcctcattgttgcatttctcctctgaaccttgtcatcacctaccttgcccaaaaggcactgcttgttttagccattgagcaaggtgggtaagcatattgaatttgctgtcatatcctccttaaaggtgcagcaatgcaggtcacatgggatcaaaaaaatgaggcttattcctaatactttaggctatacttgtgaagcctcatgggaagtttttctttaaacaagtctacagcacttattttaggcttaactaatctgattagttgttaacagaaaaggatatatttaaagtccacggatatgcaaacatttaatcagtgagtataggttttatgttctgtcttcatttatcagtgatgagagtgaccttggctatgacctcccacagctaaggatggaatgcttttggttcaggaatggagaagatgccaagacctgaccaattaggatgaacaagctcaattctgagattttatttgaagtacattggaagtggagtctttcttctgctagggttaatactactggcatattagcctggagctgtcagccataagagataatatgttcaactatgtcatcattccaacacagtgagcaaggactgagtgctactgaaaaatctggtaaacagaaggttgtttcactttggctatattttgctggatttaaattgaacgtttctgaaacttctgaataattctgtcatagaaagatccacgacagggaacattttataaataaactactcttatatcaacagagatcaaggcaaagaaaagaaaccactctaggtatttcacacaggaaagatttaatacatggggattgggtacttagaaaatggcctgaaatgctggtgaatgatgaggaatgttgtagccatcactggacttttgagttcaagagcacacccactgttgctatagctgctgtaatttcctctaaaacctgtatctgtcaaattgtgattgccaggggcagtagcagcaggaagatggccactgccctttaaatatttaagtgcttctaactggtgaaactcagatgcataggagtcttggaaatttaatgtttaacctcctggcctccctaaccaaggaagggtgggttggcaatatacagacaatccatagtacataatacagtattaaaaaaatgggttcccctgggattttattaatgaagttccttttgtattcaagagaaactacctgtctatgacagcttaaagtaatattaagcatcactaaatggtgaattaaagttttttctttttatttattttaaaaggtacaaacagtaaaattcatactttttgatatattagatttgacaaattcattgaatcatgttatcactgtcataataggatacagaacagtgtctttactccaaaaaattcttgtctgttgtttgtctgtattccagctctcttcccatctatacctcctggtaaccaaggatatattctccatcactactagctttgccttttccagaatgtcatggaaaggtaatcatacaatgtgtattgaatgtgacattagtagaatgcatttgagcctcatctatgttgttgcttgtataggtaatctatttctttttattgctgatcagtattccattgtgtgtatgtaccattcatgacttacattttgaaagaatcacatatttccttttattcaaactctccatatatttttaaaaaataacatggatattatgaaccctacttgcaacttcaaactcagtgttctttattgatgattaataaggttatatagtttaattatgattcctgggtaggatcaagaaaattagacaaatctcaagaaatttccagtctaatatatagatcaagtatgctacctagaatgtaccaagtgcccatttatgccacctcaatgagttttccaaaaaaaaacaaatattttttagatgaattatttgttgatttccatactatcatggaaagatcagtgaataccacccatattttcatttgaaaagatggactcatttttggccttattcacagacagcctttcttccagacaaatttcagcatattttgatgactcattgtagaaattggtttattatttgcagcaggagaaagcattgctagccaacagctgagaaaaagaaaaggttacaacattctgttttaggtctctaaaggccttattgggcagaatgtaatttccagctgtggattcatccagcctttgaggacttacccctgcctgttttctgaagtgttctatgattgttcattacctcaagttgtccattttacatcttatttgaaagcaggaccctgacagtgctaaactttctcaggctcagctgaactgtcagaggtaaagaaaccaagaagtttgcttgtatttattctaccccagacattctgcatattacattcattatctcacaactttatcaggtaggtagtagtgttaccaacatttaacagttaaggaagctgaagttgaaagaagttagttaccattcccaggatttacatagctcattcaagaatttttgaacccaggactctctggtaacaaagtttatgcttacaaccattttgcatttaagctttctgtcatttagaagacattgacgttgtcattactattttttatacatgaattatgtgcatctataattaagatgacaactgcttgtccagattacttatccctgtaaaaaaatgtttccgaacaatgtgaagtgtgagtaaataatacatcctgcataaaatgttttgtggatcaatgagatggcttattagaaacacttagcttcttccaagaagggtttccaaaatagcaaatgtagtagaattctttataacacttgtacctggagtcagaagtcacacgtaacatcagactaactatatcagttggggcttttagggttgtgctttttggattttagagggatgtgatttgacctttgattaagaaggcatcatggggctgggtgtgggggctcacacctataatctgagcactttggaaggctgaggagggaggattgttgagcccaggagttcaggacctcagcctgggcaacacagcaagatcctatgtctaccaaaaaaaaaaaattggctgggcgtggtggcatgcacctaatagtcccagctactcgggaggctgaggtaggaagatcacttgagcctgggaagtcaaggttacagtgaactatgaacatgccattgtactccagcctgggcaacagaataaaaccctgcccacgcacccccctcaaaaaaaaaaagagagaaagaaaatatcaaggtaccatggctaagaaggtataacaatttcttaatacagaactttgttgctgttgcaatgaggttcgctgtatcacttgaaaataatttgaagaaattaaatcagatcagggccttgtacctaaaacattacatgtgctttagtagtcataaaatatgttacgttaatgaggatgctgactggcaatcagaagtctaaaatggggcattactgacactttacatgctgtcatagttaataccatagctgcaggtctccaacctagactattgagggtctgggtctcaacccctatctcctctcctcccctcattcctcctccaccctgaattacatgcaagcctggacaatattgctttagcactttctaagtatattttatgttggcaagtcatatatttactcagttcttttgtgcaaagcaagtaagctaccagagctctccccttggggccattaatcaaattgtttttgagcttttctgctccccagggtggggacgtgtgacaaatttcttggtgagcatacccttaaaatgaaaagatgttcttgggtgatatcagacaaggtcagtttgttctttggtgtcatgaaaaggctctcccagtttgttcactgttactagtgaacttgacttaccttgtgagcttctggttacagggattttttttttttttttcatttcattttacctaccttggtacctagcagtgttggatatatagaaggtactttctatattttgtttttggaaaatactttaaagttacacaggagaaaatatatccatgtaattcagaggaggctggattcccttcaggaatgggggcattattggttttaatcctcagtatatacttattagaaaataaacaatgagttgaatgtttgacgtaggtcaagtagcatgcaggaaggataatcatagacctgcttttgcaaagcgtacaatcaagggtaaaagacttacaatgtgagaatagaatgatgtcactaccacttttatcattactcttgcctagtatgtatcgagcaacaatgaaacgtcagaacttcttctaagtcatttcaatattaacgcctttaattctcaaaacaacgctcttgaagtaagcactgtgattattcccattttacaaatgaggaaactgaaatacggagaggttaagtacttgctgaagatcacacagttataaaaggcatgcctgctatttgaatttttgcagtctgactccagagcccatacttgtatgtactggtcagatggaagaagcaggggatcccaaatgagcccctcacccaaagctgtgggttagagaagggtcccagagtcagtgacatctgtgctaagtcatggatgatgggtaggtatttgccaggtgaaggaggaggaagaggaaggtgttgagttatgttctgttcggatgataatacagactggttattatggttgcagtgtgtgtgtgtgtgtgtgtgtgtgtgtgtgtgtgtgtgtgtgtctgtttggagcagatgatacagatgctcgagccagagtatgtatgtctttgttaagccatgttattactaaatgtgggtttttatcttgtgtattgttgtgagccactgaagggctttaatcaggtaacatgataaaacttacatttttagaaaagttagttgggcttctgtgtagacaatgaaagaaagaacaggaggaagactgctggcaggatattaactaggaagctttgcagcagcccaggaaaggacggattaatacaaaactagagtcaggggaagacggggcagatgccagagagatccagggagtagaatccagcaggacttcgtaactgattggctggataggagagaagaattagacagaagagtcacatttagagtatttcaaagaaaaaaaaattgaattccacagttcttgctccaggccagtttttcattgttcttacagttcatttttctttagaaaggaaaaggcacattaaatgttaaagaaacagatgtacctgattttttatggactcctggtccatttgactttcctttctaatgctatagtttcttgagtttacactacttgtggtggcgaatactttcagtaaactttcttgtatgtcatctcttaaaaattgcaataccaatccctttaagttgccgtaaaaaagagagggcaatgcaggatgagagaaattatgcttgtcttcagtatcttaatgggcaccatactccttagatattaagactgaatctgacttttaccccccaaattatcagattctgaccctattttatttgcacatgtaaacacatgtttgggaacagcaaagttatttccatcagccttggacaatgcatttttataatggcaaattctattcttaaatatcccacatagggttaaagaggaaaatatcttctgtcctacgaaaaccatgccttgtgctttgcctctactctttgtttctgagcatcagaaactgtgtttctcttgagaatttccatctgctgataggttttctctatggttctagagagcagataaagatacaagtatcccttattatatgacagtcttgctttttctgtacagtacaggttttcaagtagtaaaattcctaccttgtttaaaatgtttaaaatctatactaattatttggcccctttcctctttgtcccttttcattttgtaattgtcattcaagtgtaagaaaaatataaccatgcttaagatacttgaaaaaatctttccaattcagaactctttgaatgtaatagagactctttagaattttaccatatagaaggaaatactgtttcaaccaccatatgaacaatgatttatgatatttcttattgtattagcccgttttcatgctgctgataaaaacatacccgagtctgggaagaaaaggaggtttaatttgacttacagttccacatggatggggaggtctcacaatcatggcggagggcacaaggcacttcttacatggaagcagcaagagagaatgaggaagcaaaagcataaacccctgataaacccatcagatctcgcaagacttattcagtatcacaagaatagcatgggaaagactgactcccatgattcagttacctcccactgggtccctcccacaacatgtgggaattctgggaaatacaattcaagttgagatttgggtggggacacagccaaaccatatcatttatgaaacagcattacctggtggggaggaaacaagtggcatattatcaaatgggacgctattattgcacaaggtcatgtggctgttaaatggtagagccagaactccagccttgttctgtgccattcctaggccctgctctttcttactttcataccacacatgtcattcctgcctctagctcacggccacagtctaattttttgatagggagcaattccagaaatgaagattcaaatcccaactaattctgttctactgaaaatatggcccatggaccagcagcattgagatcaccagggagctgttgatagctgcttgtttttggagtgcttattttgtccaagtgacgtgccaactccattacatgcattatctcatgaccttctcaaaagatgtgcaatgatacaatccttctttttccacagatgacaaaagtaaggataggaaacttattgaccatacttgtccagtgctgtacaaggaaaggttggaggtgaatttggacctagctgttctgatttcagagcttatacttttaaccatacactgcagtttaggatgcatgtggagctgtttcaggggagagcacagtagggagtgggaaggtgaggaggaaaggaaacggatggcaaatgtgtcacctaggtaggctagctgctgtaacaaagaggaccacaaacatgtaatggcttgaaaatatttatctttgctcatataacaatactgggcaggtgaaggggttgatgcaactgccacatgttttcgtttattcaggaatccaggctgatgagagctctgtcatttttagcacgtagctgccaaattcaccctggagtcaatgtagctagaaggacgaaatcaccaagaggaagggatgttcctgggaggatattttatgggccatgcccagatgcgatacagctacttccaatcacatttcatgggccaggactcaggtgtgggggcctgagaagaggagccagatgtgagtctcagacggggaggaatacctggattttactgagttttcaggaaatagtaggtcataagccgctattagaatcaagcctctgggtacatttttatatgttttattctttcaggctttgtgagagggggttatttatttcatttgcaaagcagtgaattgagatccagggatttgtccaaggtcacatggcttgttctgtgccattcctagtccctgctctttcttcccatcataccacacatgtcatttctgcctctagctcacagccacagtctagtcctttgataagaagcaattccagaaatgaagattcaaatcccagctattctgttctactcaaaatatggcccatggaccagcagcactgagatcaccagggagctacttagaaacctgcagtttcatacttgggaggctgaggtgggaggatcgcttgaacccagtttcaggctgcagtgagtgatgattgtaatcctgcactccagcctgggtgacagagcaagatcttgtctctaaaagaaaaagaaaaagaaatagaaatgtgcaatttttgtccctaccccataactgctgaatcagactggtcattttaatggggcccccaggtaatctggatgcacagtaaagtctgggaagccctggaccaggttcctggaagccagcttctccacctactgccgctatgtgactgtcatcttccttccgtgtgggagaagtggattcactgcatgttagctacagggtataaccactggagtaaaatttcagcctttttgaagagtaaacatgtttaacctagaaaggactacttagcaacataatattgaaagaccgctcagcccattttttgaaaagcatgagctgtttccatagataagccaaacaggcctgaacaaaacagaggaaaagcgaactttgctgttttgatttgtggatgatgatttgattttctaaaaagaacagctttgtttctttccctgagaacataagattactgagttcttagagcctcagctcatgcagctttcctgcttgggtatatgggtagggcaaagccagattaaagatgcacagtatcaagccatctgacctccaatgccagatttcctgcagtagtctaattaccagtttattagctgttaaccttgcaccacagttacaaaacggtaactgctggttagagtcttaatagttgataagtgtcagggagggtcttccttctggtgagaccagtatccttgtgagtctcatgatgataatttgctttagagctcagtcactggaagggaggagagaagggacataatgaccgagggtacccaagtactgtgacagaaggccatagacagctttcctatctaggaggaattcagcctgaagcccacagctcaaggggcacacagaccaggcactcctgttttgaaacaataaaatgaaactgttttttgcaagttttgttcacttgatcattttgccctgtgtctgtgatttcccttagaataaacaaattaggaacagtacctcggttttagtataagaccaagtgcagccacaacaacattgccttagaaggtaactttatgctatttgtattcaattaaatctcacaagccacccagagtgaatgttttcatgttgctttcttagagatatgaacacagagaacagaagcttgcttaagttcagagcaaacagaattccagttgcacggactctcccagttacagctgtgtgcttatcaatacttggtggatagggaagaggtggcttgtgaactgcaagactttaatacatgtcagtaaccttctactacaaattgaaatgctctgtaaatcaggaaagggtttgccatttttatgctagtgtatttcacgacagtccagttggaaaagagttagtattgatgttctattggcaaggtttccagaccagatttgatttataagaacagcactgcatataagagtgtacattgcttagatgggacatccaggaactgtgttaatctacattttcaggtacttctactcaagagaagcacagaaaatatctttacaaagttccaaaattaaattttagaaaaaggtttgaacaaaaatgtttgcttattaatttatccatggttactccagcgagctctctcatgacaactcatggcatgctttactagatgctgggccctatgcatgggtttcatctgatattaccctaaaaaggactcttcacatagatatcataaccttcagtttacagtttgagggagctgcattggatctcacaacgagcagatatgagcgctggacttccagggtcctcgaaagtagcaatcactgtgagtacatgatggcagccgacacatagaatggacgtggtccatacaggccatgactagggcaggttgtctcactcacacaaggcctgttcatttattcattcatttctcttcacttgtttaataagtacgcattgagaagttaccatgtgccaggagaacacaaaaatgaaagattcacaggtcctgccctcatggagttccccactgagtttttgtttgtttgtttgtttaaatacaagctttactgtatttcctttcttggatggttacatctaggtaagacagatacgttgtatgttggatggcctcaattaagcaagatgctaataactttatgaaactgtgggaaaaatttggagtatgttatttggttaaagaataggaacatttctaaggacagattacaaagttaaacctaaaattaaacagtttgcttgccaatgtattccttttgtgtattcctttatctgtgagttcattgaatgcttcctatgtgcaaggtattatgcagagtgtaaaagttgaattcagtttctcatgcagctgaaacttctttcagacttggacatgagcttgaaataattagagtgctagatagaaatgttcattgccttggagaggtatgtataaagtacttgggatttaaaggaagagagaattagagaaaacgtgaagggggggaaatgacatttgagccagacatcaaaggacagacaggattggaagatggggagataggtaggaatagaagattcattttagccagagagaacaatagggaaaatagaagagtgactagcaggaaattcagctcaaatttgagatatgaaagatattttataggtatcaataattgacttacttccaaagagttcatcatcattttaatcttccttgaagattattttttaaatccaagtaagatattttaaaaattagaccgtacataaaagttgaaaaaggaaaaaaatgctgaccttcactccagtgaaaccactggctaacgtttgagtattttccttcaagtcttttgcattttgtttctgtgcctctttttgagtagttgaaataatgtattgcattctgccttttcatttaaaataatactaccagcacctacccacgttatgaaaatctctttggaatcgtcacatttaatggccttatactgtttagccgtttggctttgtcatagttgactttaccccaccctattgctggagtttagggtgtttcatgttttccattgctatgaacagactagctgttggccagccaaccctttttgtatttcacaaatggtaaagccaaggcacttgtaataagccaagatggggactgacttgttcagttgctagaagccaaaagactgttgcataaaaagctgccttctgactagaagaggggctgtggggtttctaggaatagagattaataaggtgcttaggtcatatcccctgagaagtttaatctgagtgggccactgaccttctggcctctggaaaggagatccattgaatttctaagccctttggtactcctcccatttcctgcggaattttgattgtgggtaaagtttcaaaacactggctcttcacattggatttccaagttgggaagagaaggcaggaagacctatcaaaggacaaagatattgtgttctccacttcgatctgaaagatggaatggcaggggagaagggaagggaaaaaaaggaggtgggtgtctctgtcctaatttcactgggtttctcatcccattagttgaagttagcaaacaggaaagcattctccttaggaagaaaaatggcaagaaaactgatgcctgccttgcttggatttttagtgttgccaaacacctatgtttgtgacttattgattttgtactatgaacctagcctgctttgcatcagctcttcttgtctttggtcgcgtcttttctttgtgaaatttcactcggtgaggaaatactgaattggagggagatacggtccttactgagcatgctgaagtaaatccagctattaaatccagcataaatcccagcagaaagtagtgtatcagaaatgtggttctgtatgccgaacatgtgttcataataacagtgcctggaggcatatttgtattatagttcagcaaaggaaggagacaggaaggagactcttagcttagggcaaagaaacatctgctacaaaaaaaaaaaaaaagaggtataccacatttatgtaataaatactgttttgaaagtttctctgaaattagtttcccatattaaatcatgcttcaaactttcttaggaacttcactttttcaaagaatcgttctattaaatttttgagagagagcagaatttcttaacagttaagtatactaaccctgggatgaggctaccttattcaaatattggcttcaccatttagtatctttgtgactttggaaagtgatttaattgcttgagggcttaatttccctatctgcaaaacagacacaataataggaccatcacataaagtctctatacagattcaatgtgaaagaacattttagaatgcagtattagaagtagtttaatcactttaaaatgttgctattaataatctgttaattagcaagtgatattatgcatgtaaaataaaattttggaacaatatttttcttacaatgagccaggtctgtaggctaggcatattaaaatatttaaaataagtcatggtatattaggttaaaatgatggaatgaaaacactccaaatcagagtttcaaagtaattcaactgaactgtaaagcaaaataggtataacacaattctatgctaaaatgttttaatcttaggtttatcatataacattttattacctaaaactgctaaaacatgtaggttttatatttaaaatgatagtttgtatttagtttgaaatgtggagctgaatgattttgcaaaattaaattgggaatacgttatattttaggtaccctggaaaattgtctgtggttagatggctgatacctttccttcttatttagtttaattgaaaaaaaattggcattgaagaattaaacacactctaaaatttcaataaatattccatgactactttatttatctagatatcaacttactaataatatcagccatccaagttaaacaaaaagtaaaacatccagaagtgaaaaatacagccaaatgttgtacatggctagtatacagatcctgctataaaatgctattataaaatccagctgccctcactcagagcctactgattcttatatatcacataatctttcccttgttccttcctctgaagacagtaggagctataaacaggaacagtttgggagaaagcaaagcccggcatcaaaagagatatagaacaaaatgtagacacacaactttgttatcacagggcatgatgaccaaggcattcctttcctcattcagttattcacttcttcatcaaagattctctaatcatctgtgatagtaccagtctgtcttctaggtataggctttagaaaagtaggtaggagagattcagagaaaaataggatataaacatttctctgtcaggttgctcacaataaggttgacgtatttgtgttcacaataattcatgtcatccagaaaagtgatgttacagttttatgtacttcagagtcacagatggtttgctttaattttattatacccccatactcacaccctggactgctttgcaagtttctaattgcttcctctccctgcctttttattttggatttcctctcttcttccctgtatctccttaatactcttcaataatatcatttatataacacaatcacagtgcccacttactcactagagcctcacagagatctgtcatccgattcagcctattttagcaggtatataggttagcttttgttgtgtaacaaaccaccctcaaattttgcagaattttttaaatcatgttttatttctcacagttctctgtatttgttgagtggtttttctggccatggctggcttggctcaggttggataacctaggatggcctcactcactttatttggggcctcagccaggaggactggattgactgagacttctatgtggcctctcatcttccagtagattgtcttaaccttttaaacatgataatctcagggtttcaaagagaacaagaaggaaaccccaatgtacaagtacttttcatgcctctgatttgtttcaaagcaagtcacatgtctaaaacccattttcagtatccatgtggaacgaaagtcttcatatcttgatgggagaagctgtgtagtcatattacaaaggagtgtgatcaagggaggggaagactttctggtcatggaaatggtctaccatgcctggagaaggagtggtaaatatatccccccagaagggacacactttatcttcaggcagaaaccattggcctgaactagtcatatacatgctcctccttctacccctgcccccagctgaggctgcatgcaaaggaggatgacaaataaataaagccctctatgtattacatttgtctcacatgacaaagttctatttcacttattttcccttgacaaaatccattgaggcctttcagagttagccatattcaaagacaccatgaatttccaccttcaactcttaggtgtctgaaggctgatcttctaataggtggggtttgggggacggttttatgaagtactttaaagtttcagaagcaagatgctgtcttgctgctgatcatttatagtctcgaacattacatgttgcatttcacataagaattcttatcctttatggcctagctcagaagctttctccaggaggcctttctacccttttctctcctgggcaggggttatctctcctggttctaaattcctgtaaaatattattttgcttatgttgaatagtctacctactctgctggatttgagtttgttaggatagagtctgtgtcttatccactattgaattctgtgtagtatctagtctagcagggacacagtgaaataataaatcatcccttgataaagaaggaggaggctatatttaaccctaatgccctactttattccctttctattatattttttaatgttccatttaattgttttctatccctgagtcaccaacacttaaggccactgtcatgtatggattcctctgttaattccttcattgagaaaagtcagaagagggacacattcattcattctatacaggtctatattgagcacccactacgtggcccatatatttgtgtgacagagacacagcagaaaacaaaatatatgtagtcactactctggtagaggaaaacacaaacaagatatataaaggatcagagatgaagttgttgatgtgtgttacgtagaaaaatctaggaggtaacaagaaagagagatcctggtggtggtgagatgccattttgttctgagtggccaggaaaagcatcttagatatggtgacatttatactatgatctgcaggcagtgagccatgccgatatttagggaagaatggtctaaactgaggtaatggtaaatgcaaaggccctgaggcagaattgcaagtggcctctatgaggtacaggaggaagtccatgtggttagagtcaagtgagcatgggaaaggaataggagatgaatggagagagatataaggctagattatgtaaggtcttacagcgtgttgtatagattggcttgtatcccaagggagatgaggagccttatgaagaaagggtaaagaaccaaaggtatggagaattacatgggtttgaagaaagagttgggggagagggaaatgtatgatctttttcgtccctgtcctccaacattaagtggatttctcaccttggtcccccctgtgaaaaatctacttccaagattggctctgtgtttgctaatcatcagtatctatgacatgtatagaaataccttcttccacaggaaatagataaatagatcagagataaatagactatatagtgtttgctggtaattcttgccattttaccagatataatcgtttaaaaaaacatgtcccatatttatgtagtgctttattataatttaggttctcaaaaagattagtttttaaaccaggtctagagctctgcttaagttgtttcaacaaaacccaactcattatatgttataaatgaaaaagcagttatttaaattgcaatggccttgatgtcacaggactataaatgagaggatgcccaggggaggggagaacattcactttcagcatgataaaacatcctgcatgaagatatgttatttttacaaactcattttctgcaaagaaaaccatcaaaaaacaaggaactttctgtgtaagtgtgctaggaatgttttttttttttaaatttgttacaaaagtaacatattataataaatgtaaacaatttagaaatttttagcattttaaaaatgtaattatagtcagtttataatggcattattttaaccagggcaaaccagccttgttatgaacacatttgtttattttcaagataatttgattagagccaacttattggtttcatgtgactaatactgggctgtggtgtgcattgtttagtcaaagaaaaaattaaattatcatttttactttctgtggcctttagtaaataaaggctgatttactaaataaagcctgacttactaagttctttttagcatagtatagttctcctcatagtagaattcataggaaatcttggccctcttttatgataaattgatatgcttgggtacaagcctatttattactgcaatatagacctgctttctgaggttcttctttctcaggaaagtaaataaacattacagaggatatttgctactctgtgtgacccagtaaagagttctcctggagaaaactttgcaaataacatgatcaacaattgcatgctttggggccataaacaaaataagcaaaaaagttgttttagatcctagaaaagcttgatggagcattctactgtctggtaaacaagaccagagtaaatatggctccaggtagcaagtgaacagccagaccagggtcaaggccagcattcgcttgcaggggttagaatgctgtacagcagtgaaaatagtgtccatgtctattgtgaaatagaacaatgccataaatgcgtagacatcatcttttctatcttgggagcctcctgcaaagtgacattataggcatgtctgttttcagatggggaaactccttgaaatatagtttgtgggattctctttcagcttcacagtaattggttgaagcaggtcttaaaattggttcttttcacatggagtgcactttaccattaaaaggaatccatgtgtctcatgaaaatgtgagttatcttgtgtaagtatgtgtgttggtgggtatttgaaattagcctggagtttaggagttttaggggtttttccatctacttttaaattcttggacatagatgcctacaattaggtagtttatcaataatcaaataggctaaaatataatgaacacatttgggatatatctccacccataaaccttcatacttctttgtaaaagttttgctgaagaagtatgtgtttatcatatgaggaggtggttatgggtatagtggaagagacagatttaggtttggaaggtaataattagggaaggttctctggcttctggttttacttcaatgtttacatctatttcttcaggcctaaagccttttgtcccattgtcaagaatagttcaggaccagtgttttattccatgaggccaagagagaaaatgccagttgtgtggccaatcacttaagcttaagaatgtgacatagtactctgcagagaactaagaatgtatcttgaggtactacatctaggttcaaatataaccacaacatacagtgggattcacagttattttaagaccacgccagtgaggtcattctgagtcatgacctcatggatagaggattctaatcaactgctgaagtctacagagaactaatgaacgaaagagtcctgagatctggtaggggaattttgaagcgccatcagtatctttgtatagactttccatcccctaggatctgtatggtcaaataaccagaaaggcttccatggtcaccttcctggacacctggctgtgagccaaacaacttcttcaatctcttgccaggtctctagtctgtgagtcaaagaataccatatttatgagtgatgttttgagatagtgggtgctctgtgaatttcaggtagtgtttttttgtttgtttgttttttcctcaccagggagcatcataatttttcagcatgtttgttaacaatgtacattttattttaaaaaaaatcatgacaataaattcatacattgccaaataacaggtgtctgctatctgattctgtcagataaactttataccttttctggaatatatgagttagaaaacttcaggtatcagactcagctgcctcaagtactgacataccaggcatttctctgtttaatcatcactcaactcatggatgaaagtattaggaaacagaagggattatgaagataactaaagttattactggcacttgaactgaatttctcttaaaatatcagtttactttgatatgtgctacaaagaccttaaccatgtttctgtctgattcttttgtgaaatgaaggtatcaatacagaatgaactgttttgataagctccctcacaattttaaagtatagagttaatctctaagaactaataagcaatgattccattttcttgattttatttttatgagccacagttttatatcccactgcttatctgatttgaaaatggttgtaatattttgagaaagttaatatcgagtcatgccaaaaccttaataaacttagtcttgaactaatatttcaggctcatgagggatttctgtatgctaagatagattttaatattacagaaatgcaatagtgacctttccataaaaccttaataaaattactttgttctataaactgcagaagagatgggaactttcttgaaagagaatatgcatgatttatctgcatttcatggcttaatcttatatctcatttcttcagatctcttatgtttttcttttccttaaggcaaacaacagtaatttccatatttttaaactagagaacagacagaatttttcaaaggcatgttttccttttgcaccagtgagattgggttttggactggcagttcaaggatgtggttctattgcagctccaccagcaggattgtggcaccttgccaagctcacctgaggtttcttggcctatgttcccactctattacaggaagagctcagattaagtctgaaatccctaggattatcttttatcgactgttgcttaaatgttataactttcatattcttcaacattcttgtattttgttgatatggttcttaaaattgtggcacagaaatgtacaaaatactgtaagcaatgttaggatctgaaagttcactaattttattatagccctttatcagtgacctccctaagactgcgttaaggtttcaacaagtacctcttcaccattagcttattaaggttggagttcaccaaaagttcagatgtttttcacataaaaaggcctttttcctttgtcctgtagttgcttttttttttttttaacttctacgatctttgcattgctcacttttacatcaatcttgataatttgtcttattcttcaaagcagtccttttgtagcagtgagcccatctcaggacatatttggacatctggaatactggagggagcactggtggagatgtcttaggaggctgctgaaaacgagggagtggagttttggaagggtgaggagaagagtgataccataggattgccctgggagggagaatactgagagccaaaaaggataaaggacagaggaggtggagggatggccacatgtggaaagaggatcaggctgaaggtaggagttacattctggaaaggttaagaaagatcaggatcaacataagaacattgagcttaaagaccaaaagtttcagctactcaaaaaggcatattttgaacagaacatatatgctagattccatattttaagacatttacagtgagttgacagttaggaaatgagggtatccagcaaagtcttttttccttttttcacaaaaattggccatgggaaggtataacatagatggccaaaatataccttaattataagtcttcttctctgtacaacttcagggcacaataattaatttagtgacagtagatattttatccccaaaactcaatttaacttattatccatgcaattgtcatacttgaatcttatctcttttcctgtcttaccttgggggttggtttcaaatatggcagaatagaaataaaaatatatatacaatggcttaatcacacttgtgatttcaccagtattaaatataggcagcaacattgattttattaaaatactccctataaatattccccaaatagcattgtagaccaattaatgtcatggcctaagtggctagattgtgatgtttttataaaactaagttttctctatcatatttggaacactctacaaacaaagccaggatttaaagacacagtgatctatttaaagtgaataatgattttataagggaataaaaaaataaaagaaacttgaaattattcgggttttttttggataatataaaatatttactgatgttgatgctgaggttaccaggatctctgtcctcaggtcatttcaaagtggaaaattggaaactgatagtaatgtggacatctcctttattgaagcaatccttattttttattaaactacctcttattaaagcagcttaaatacagtcccaggaaaggatgagtttccctcattttggttggaggccatatctttagagtgtttttttacttgaaattaaggaactttcgtcatgagaaccaaggtcagacaatgagggtgttcggtcaaaaggtttgttaagttctattaatagttctaccatatttgagggattctaagctttctgagctttactttccacatttttccagttgtgttaagatttctaacttcaagagagtatataacttcaaaagagtatgtaaaaatacttggtaaatggtgaaacagtaagtggatgctgggtgcctttattgtgagagctttgagaagtgtgtcaggtcaggggtaaatagcccctgcttttagagcagagtggtgactttcatttctcattactgcagaaggtccagcatctcttgcctaatgagaatgtcatcctcctggtctccaggtcaggccgttgagttctctctgatgtgtctttgaaacttgctggcagtcttgtagcattttagaatatgctggatcaaactttatcctttcagaaaaaaaaaaccaaaaaaaaaaaactaattgattgcagacacaaggaccaaagcaatttttgtaactgttcattagtaccgacacttgggaaaaccaaggatttgtctaacaaggggcagggaacttagttaaagaagctccattttctctctctttttccccagcctgcggatatggtttgaattagaagttaaagaaatttgctaaaatgaaacaccatgtgaactctttggaatcgcttcacatccaactctctgacctttgatatcctttctattgcctctgggccttgttagagtgagggatgtttttcagtttctatataagcaatggaagcaaacatgttttaaaataatgcaataaaagcacccatcttatgaaagggacaattatttgaagactgttgaccttacaagaattggacaaggatttggcatcttgaaagtgtgctttgatactgaagagttgttctagaaatgccactatgtcattactctgtcagttactcttcaagacacaatagtaatgcattgttttaaatcttgcttggcccatctgaatgtggctttcattttttcatttttggaaatgtatttcaggaaggatatatatggttattaaataacatttatatttcataggagctcaaataatgtttaatcaaatgtttattaatgtaaactaagaaggcatcacagagataaaactaatataagctaagaaaacatcagataaattacagtttcaggatctgtattttacagacaaggatactaagactcagagggttaaggggcttcctcaaggtcacacacctagttgggacagagctggggctggaatgtaggtcttccatctccgattgcccttctctttccattccagcatgctatatagctcatattaatttaatattaattgtggaaatagtgtaatatataatcaaaggcagactcatttttaaaaatggttaatttacttataaaactataaactttgtatttttctgattcacttttccaatgtcacattagatttatttcaagttgtgtgaatgttattgctggtatttctgatgtgaatgaaatagactcaattccactctccctgctggtctatcagaaaaagccaaagacagcatctaatatttacacctagttttaatgtgcagcctcacttacataaaccaatttgcacagtaaatttcccattattttaagtaatagttaattagtaatgccaaacctgaggaggaggggcctgaaaaggtgacacttttaatataagttaactgagattaaggattttatttccttttcctttcagactggatgtatttttgtgcataaaaaagacaaagaggaagaaaggtttagagattttgaaaataatgtgcatgtataaaaaaattaaatcaacctccccaaacctcgaattccatgtgatttttttctcactatctctattttattagttccatctctgtacttactttaagcttttggacttcaggtggaacaattttgggcgcataaggagataaatgaccttgtgtgagatttgagatttatgtaggtgacatttttttgactaaaggttactttcagatcatggggcagtacccctgtgtggatgaacatatgaagactgttgatttcggatatccttaagcttgaaaacttgaggaagaatgttttattttctccttctatggtctgagctcagttctaatatgcatggtcttaggctttatcctcttcttatgactcctgtataataatagcaaagatctatttataaaagtagcttggagaatttttaaatacaaggaattttgattaaattgaagagctcgttgtgtgtgtatgtttattttaatgagaaaatagttttaaaataaagaatgcctccagtccttgaatttatgcctgctcctttccaaagcactttgcccatttttgtgaagtctcattttacaatcctcaggcttactccatactcacgccggaggcaaccttcagagagcttattcaagtgaagataaaataaaaatctttcctttgaaatagtccaataataaggcaaaatcaggcttctaaaaagagatttccctcttgacatatatgattcatgttggcgatgttttgcctgataattgtggcaggcagtccaagggcaaatgaagggcaaagtacagagggctgggcataagagacaggaggaccttatgggctgcccagaggtctcctctaaagagacagtctctagggataagaacatcacgcacctcatgaggacatgtccaggatcaagccccaccagtgaggacctaggtgccaatctgaacagcccttactaagggacagtgatcagagagggtctaaggagaacagaggttcaggccatagaggtggtgtggttggaatgtttattctagaaattattcataggcacaatcgaggctgtcaaacttggtaaagaatggaaactcattctacaggcctggttttagcctgcagcaggcaggcagcagggtatgagtggagaacaaaacactgtgaacagcatttcaggatactggagagaggagcaggtatacacagaaatggtactaaagtgtgcatttgggctgggcacagtggctcacacctgtaatctcagcactttggaaggcaaaggcaggtggatcacctgaggtcaggagtttgagactagcctggccaacatggcgaaaccctgtctctactaaaaactcaaaaattatccgagtgtggtggtacacacgtgtaatcccagcagctcaggaggctgaggcaggagaatcgcttgaacccaggaagcagaggttgcagtgaggccagatcgtgccactgcactccaccctgggtgacagagtgagattcaagaaagaaagaaagaaagaaaaagagagagagacacccagagagagacagagacagagacacagacagaagtaaggaaagaatggaatggaatggaatggaaaggaaaggaaaggggaaagggaaagaagaatgaaggaaggaaggatggaaggaaggaaggaagggaagaaagaaagggaaggaaagggaaggaaagggaagggaaggaagggaaagaaagaagtcactgcgctccagcctgggtgacagagacagactgtcagaaagagaggaagagaggaatgaaggaaggaaggaaggaaagggaaggaaagggaaggaaaggaaagggaagggaagggaagggaagaagtcactgcactccagcctgggtgacagagagagactctgtcagaaagagagaaagaggacgagaggaaggaaggaaggaaggaaggaaagaaagaaggaaggattaagtgtgtgtttgtgtaagagaagagtccattgtcctttctgccttgatttgttttgggggttggttgggagctcctccacagagtaaaatattcattcattcattcattcattcattcattgtttactgctatatgctggacactatagtagcaagcaaggccccagccttcacagaggtcatcatgtagtgatgatacagataaacaaatagctgtttaccaggtagggtggtgagttcttcaaagggggaagcacaaggtgcttaaatgaaaatacagagtggtgcctggcccagtttctttaaataataaccagtaagtttaggggagtaaataaccagtaagtaaataaccagtaagttagtgaatgagaagaaaagagaaatgtgcaaaatgctcagtaccggggggcaaggaatcaattctgataaatacagagaggagaatgtaaaaggaaaggtggtgagggaagatgctgctttccagtgcagctgagggcacgtttcttctagaatccttgtgttttaacataatctttctcctcagctcatttgtcaattgcagttccttaaatttaaaggaatttgctggttgactcttacccaatattttttcctgagttcttaggagaaatattagcattcatagcttgtagttaacagggagcataaaggtttgggccaaaagaggtaactgcttgaagttatttaagtgactgtgaagtctgcactgcagattaaagggatgttgtgttggctgagggtttggttatgactcagtcaccctttatttactttcttcaagttgcctgtcattcttaactggtttcttcttacttaactcttaaggatgaagcttgaaaaaaaatggttgagaaaattaccatttacttcaggctctcagtatctactcttggtcttggatggaaagcaagtactggccttcagagtctccataggcttggttgtccatggacttcctgagaaaagcgtgcattctagacaaatggactgtctttcttacccaagctttagttccgaatacctagccagcttcttttcctggtaaattgggctgggctggataaggatttaaagaccattttcctcttcccccttttttcctttttgctggagacttgatctaaggctgttttctcaaaccttagcttacattgcaatcacctggctagctggatacaccgtggattcctggaccccaccagcagactttctgatttaggtctggatgggggttgagattttgcatttctaagaagtcccaggtgatgtctgctgtcggggtaccatactttaagaaccaataatctaaggcaaatccagggacctaaagattctctagtctttcccctatgctcccagcttgagttcccatcttggctaaaaagaaataactcaaagagtattcctgcaaagaagaaacttaagctgaggaagaggtcaacctaagcctccattctcatagtccccactctggaaccccaggactttttaaagactagggtcctctgtgaccaggaagccctgggttaagaaccccttgaaagatccaggagagaccagtatggaatctgtgacctctacctaaaactatacttaatttgtgcatgtttcccttttgttttctatgttccaagaccttctcagaactactactgttagatcaaaaagggctgaactctccctgaaaattgttgcatatggctagcacctcctactaagggagaagttgttgctttcctgcgcggtaaagtatagacatccaccatgtattctgttagttctgtacttgaaaacagtgacaagttctacttttgagagagggaaaaaactgctactatacagtctttcatttacaaatatcccagggtgctctaatcctcttatttctcagaacttttatattctttagggctgatgataactctgtttatgttaaattctcagtagtaataaaataccctctgctctttgctgcccttagtaagaacagaaatactttatttcagaggcataaaagataagaaacaagatgacttttgtataaggtgtaaggaagggatccagtttcagctttctacatatggctagccagttttcccagcaccatttattaaatagggaatcctttccccatttcttgtttttgtcaggtttgtcaaggatcagatggttgtagatatgcggcattatttctgagggctctgttctgttctgttggtctacatctctgttttggtaccagtaccatgctgttttggttactgtagccttgtagtacagtttgaactcaggtagcgtgatgcctccagctttgttcttttggcttagacctaaaaccataaaaactgtagaagaaaacctaggcagtaccattcaggacataggcatgggcaaggacttcatgtctaaaacaccaaaagcaatggcaacaaaagccaaaattgacaaatgggatctaattaaactaaagagcttctgcacagcaaaagaaactagcatcaaagtgaacaggcaacctacagaatgggagaaaatttttgcaatctgctcatctgacaaagagctaatatccagaatctacaacgaactcaaacaaatctataagaaaaaaacaaacagccccatcaaaaagtgggcgaaggatgtgaacagacacttctcaaaagacgacatttatgcagccaaaaaacacatgaaaaaatgctcatcatccctggccatcagagaaatgcaaatcaaaaccacaattgagataccatctcacaccagttagaatggcgaccattaaaaagtcaggaaacaacaggtgctggagaggatgtggagaaataggaacacttttacactgttgtgggactgtaaactagttcaaccattgtggaagtcagtgtggcgattcctcagggatctagaactagaaataccatttgacacagcaatcccattactgggtatatacccaaaggattataaatcatgctgctataaagacacatgcacacgtatgtttattgtggcactattcacaatagcaaagacttggaaccaacccaaatgtccaacaatgatagactggattaagaaaatgtggcacatatacaccatggaatactatgcagccataaaaaaggatgagttcatgtcctttgtagggacatggatgaagctggaaaccatcattttcaacaaactattgcaaggacaaaaaaccaaacaccgcatgttctcacttataggtgggaattgaacaatgagaacacatggacacaggaaggggaacatcacacacaggggcctgttgtggggttgggggagggggaagggatagcattaggagatatacctaatgttaaatgacaagttgatgggtgcagcacaccaacatggcacatgtatacatatgtaactaacctgcacgttgtgcacatgtaccctaaaacttaaagtataataataacaaaaaagaaacaagatgacttttactctggagcatatttataatatgtcaaaaacaaattctactaaaatagatttattattcatgaaagagaaaaacccagttagattatatattcctttcctcaggcttctatagcccgcacccccccccacaccatatatatatttttttgctaaaggttgatatatcttgcatgctatcaaaaaaatttctttctagcggtcacttctgtaattcactactataaaaatgattaatatgtgtgtacacgtgttctcactcataagtgggagccaagctatgaagatgcaaagggataggaataatatggtggactctggggactcaggggaaagggtcagagtggggtgagggataaaagattacacattgggtacaatgtatactgcttgggtgatgggtgcacaaaatctcagtaatcaccactaaataacttattcaggtaaccaaacaccacctgttctccagaaacctattgaaatttaaaaaagattaatatacaaactatcttctgtttctgaaagatcaaaatactgttaagccaggggtggatttactaagcacttaagaacatgacccctcagaggacatcacgtgtagataggccccacttctgccactgagccctcctgtaccattattgctccctagcttgaaccattctaaagttgaatgacaagggattatcaggctggaaaacctcagtcatggacaactatgtacttttaatacgatttcagctccttgatgtgttctagaggattttggagggctggcataggaactcagatgtcatttccaagggaattgctacaggcaaacaaccaacatccaaacaatcttttgaaacagctcagttattctcttaggaagttgttatacttcgttgtattctaatttctttgaaactgattattgcagattgaattaaattgccagggctcagaacacaatacctgaaaacatggcaccttgacatactgagtattttgagataaaggaaattgagaaaactgcagaagctggaaggtcaatctctgaccttctttcctgagacaccttcatgtgacaggtgtcccactttatgcctggagggaaggaatgataacacaaagataccaagaagaatgtgaagagacctttctcagttccccccagttcaagaccattatatcgtacccacttttgtctaatcatgcttctatatgactatccattctttatcaaaactaaacatagaaatatacgattatctcaatttctgtctttgtttctgaaggctcctgtgtcacataaaacttacattaaataaatttgtatgtctctcttgttaacctgtcttttgttatagagggtctcagacatgaactttgtgatggatgaggaaagatattactttttcttccctagaatatattgacagttattcattatatttaaattaagctggatctctaaatactccaggcaactaagcatattttagacatgttttgtaaaatcctgatagattgaaacctataacacgatcacaaatgtcatctaatacatttataaacctggatcttcaccccaggtaactaaacatattttagacatgttttttaaaatcttgatgtaatggaaccaatagcatgatcacaaatatcacctaataaatttataaaggcagtacactttaatatttttattcatctatttgtaattattaaattttaaggaagttacacttgcccctcaattatgattaatattgaggtacgagaggcagggacaaatagcgaatgcttgctttctgtttttattttattcctgtgcaatttgtgttcttttaatacactccaggaaattgtttttaatcatgtgatgctttataatagataaatcatagcaaaggccatagatttcttgtagcccagaattcattaaagtctaattccagtaccatcacaatcagttttttcccaaatataagtattgcagaggtttcagttaacgttcattttagtcagtatattaagtaactccttactaagtaatgaataaggatcagtcataactgggatgtgtgaaggctcccattgtacagggaaggttttaaattctgaaaggggagaacaacgttttacagctttatgtatttatctcttcctgttatttgttcttgccaggatttctgctagaaaacatagacattattttaagactaatttatatgaaaagaaacaagttttaaaattgtatcctccatttgctttagaaaatattttttctggaatataaaaattacagtcactatgaatattttaaaatacagggaagtattaaagaaaagaaaattctaaaattacatcagctagctgtaactactatttgttttggtatatgtcttgctagtttttcccgttgtaaaacagtgtacatatgtaagcaatatgtgtataatatataacataaaaatttggatcagactcgtgtaattttatagcctgtggttattttttttcttaactgtatgttaagagcatttgtctttgcttcacaagagttgtgaatatttttagaaactcttctaaatttgctattgttaagcaaataactattcctttaaagtactatttttaatgggtacagtatttaagtactagagtgtgtttaatcaattgcttagtgatgattatataaggccaatatttttctaccataaacagcacaacagtattcttgtgcatagattttgtacacatttacataggataaatcctacttgtacaattactagataaaagagtatggatatttcaaggctatagaaatgtattacaaaattcttttttaccagatatgccctcaccccatccatcaacagcattgcatattatcatatttttcttcctgtactctttgtatgttttttgaaaaggttatttaatggcttaataaaaatggaggtatttttgcaaatggggaagttatccctaatgatacaatatattaatgtcaaattagattcttactggaggtaaagccatttatttaaaagccctggatgatctgatgacagcttgttgatatgtttttagaaatataaggatatcttatttaaagattgaagagcaaggcactgaaatatgtgtgatagattcaactgatttacttgtggtcagtggaaattttatcccaactctctatgttctggaaaacaactttggttgtgccatcatgaggtcacttaaggtcatgggttatttggtttaatgggatttgtatggttggatggggaagggattaatttgttatggaaatttttttgtcataaggttgaagttaaaagttgcacttaataaaatttataactgagtcatggtgcatttattcacttgaaagctatatgttatcaagtagaagcaaatgctttttcagatgaattcattttttcacaaataggaataaaaaatgaagaacaccttgtttggcttcgggggagctgcaggatttgaagtttgtatttattgctgagatgcaaaattgttacaagacatttggaacctggggaagagtatgcagaaataatgtcattagtcctcaaaggggctttggaacagaaggacaggaatgatctgaattcatttctaggtgaagtttattctgtacttttctctctgtcttcctctgatgattcagttgaacacacatgttgaatgaccattcccttcaaatcagagcagtctgtactgcattccaaacttatttggcaactttttagttcttttaagaaaggtgttcagcttcagggggcccaatatatgcattttctgggctactataaaaaattagcacaaactagtggctgaaagtaaccaaaatttattctgtcacagttctcgaggccagacgtctgacatcaaggtattttcagggccacatttcctccaggctgtggggaagaacccattcctggcctatttcaccttctggtggctgccaactcttcttgaactgtggctacatcactctaatctctgcctccgtagtcgcatttcctcctcctcttctgcttgtgtcaaaacttcccctgctccccttttgtaaggacatttagggcccacctggatgatccagaataatctccccatctcaagatctttcgcttaatctcatctgctaagtccctttttgccctgtaaggtaacattcgcgagttgcagcagttaggaggtgggtatcttttgggggccatttattcagcctgccatacccaggtaccttagatatgcctggtttcacatactgccctctgttcactctctaccagaacgtgaggcacatgtccagagacaaaaaattccttgtgaaagtattgacctaaactggtctaggttgggggtggtggtgagggagggtgagcagcactgactctaaagttgatccagcacatctgagataggtggtctggtaattcctgaagaccaccttataggtctagcaaggaagacaagacagcaggtttaaagactcaggacagagtaggccaagaaaaccaaatctcttccttggttcaccccaaccgaatggatagaaggccatatttatgggtaatgcacatgtcctacttgaatatttggcccctcgacagcccacctcagcccccttgtgttcctcctaactctgccagtttcttattatcatctttaggaggagcttttgccacttgctctggaacaagaccttctaggactccccttctttcttgtcccccgcttccaaagtttcttgcagtccagggagtttttcctctgccctagtgcaatagctaatccgatccagttgcacaaggatttagaacaatgcgactatttaaaagccttctggcctccttccagtaactgctcaatgtgtttacactgcaagaggtttcaggctgtctattctttgacaatgtaaagtctcttccacttcccgtgttcctcaaagagaaggtggatcctttcctgtgggctctgcatggtgagatgatgccattctaggaggtggaggagacaattaaaccttgaaatatcttgtaagtgaggccttggaaggcaagctagagaatttgagaagaggaacttttggcatggtacaatcaaagcctttttttttttcaagccagttagttggctgtgggttgggatttgagataattgcaataagaatgtagttatagggtggccagttcctcccctcttttaaaaagaagtaactgtccctttaacattctctgcagtcactgggactataatgtgtaccttcgtttgttcccattttaaatcaattatctggatcaaactgtagtgaaacaggattggctgggtcaacattttctagtctgtaggtcatcattgtaccatgtgtgtaaaataacccagctagtgcccctgatgccaggccctaggaagttttccacagatagcacaaagaacagcctcgaccacagccaccagtttcaaattgggaacactcaggatactccaacatcattttgccagaatacttcttaccttgttctgaaccccaatgctatgaaggaataagcaatgaaatgaactttcacctccactgcagaagagattaaggtcaaaattaccctcctccttcacctccaaagttcttcatatagtgagactattgtgatgaaattagtacccaaggtagagatgaatattttagtagttaagaatagtagtgaggtctgagaaacatcatatactgggtactcatgttgattctaggagaaccagagttaaaccaatggaagatatgcaaactgtaaaaagctttttttttttatttttatttttgatataaactttttgtatccaaagcctcttactgatttaaaatgaaaccaaagggatgaattaaaagggatggttgtcaggagtgagacaatcatagaacacataaaattctgcagaaaagagatgttttgcccaccattcttcacagcctggcaaactgggatggccaccatgttgttttttaatctatttttcaagctaacacttagctccctgtagttggttattaaggggggtctgtgggtctatttttctctgcagatctgttttatagcatagaaggcatgaatgcacatcatctacctcagaagcttgtttctaagcttcttgggtagaagctatgtggttatgtgtgtacatacatgctatattcaccaagctatgcaaaaggtttcaaagtcaaacttatttcttctgtgtaactgatagaaggctttgtatacttcgattatcaactccacattccccctaccctcagcctttggtaaccactgttctgctctctgcttttatgagttcaactgttatagattccacatgtaagtgagcacatggatatttgtctttctgtatttggcttatttcacttagcataatgttctccagttccatccatgttgtcacaaatgacagaatttcttcccttttttaaggctgaataatatttcactgtgtataatacaccacattttctctatgcattcatttgttgtgggatacttgggttgattccataacttggatattgtgaatagtgctgcattgaacatgggagtgcagatatctctttgacctactgatttcagatctttccagtaaatacccagaagtgggattgctggatcatttagttcctcaaaaaactaaaattccatttttagttttttgaggcacctccatactgtttttgacaatggctgtagtaatttaagccaaatgtattttaactttgaaagatatatactttttatttagcttttaaaatattctgattaaagttatatacaatattctcttagaatattcacattctcattctttaattatatcccacttttcattgtaaatgttgtgagtttgtgctgcagccacctcctcctcctcatcctcccttctgcccccacctaaatctccctctctctgtgtctctcactcttgctctaagtacttgccaaatatatatccaattcagaaaacaattaacttttgcttttactgatcattgttttactatttttttttttttggctacatattacatatctaggttttggtttgtaatgctctcatcttttctttctaaaaagtttataatttctgcttaactcaagaatgattaaggggtgtatgtatgtgtgtgtgggggggtgtgaatgtttaatttccatgtatatagatgttgtacactctctgtcattaatttatatgtttccttgttgttgtcaatgagcatgaccacaatattttctgccttttgaaaaatgctgaaatttcctctagggcctaatcgtgatcggattttgagattgtcacatgtgtgtgggtagccagggtgcaaagagggaaagaaaaaaaaatgtatttagagagagaataaatatattaagagagagaataaatatcattaagtactgttatttaaattgtgttactttgagttatttaagttgttgtactaaattattaagtatgatattcagatcttcgagattcttacttgtcttcttattctgttattctgagaatcattgtctcctgtttgtgactttgctaatttctccgtgtactttgtcaattttcaaatgttgtgatgctgcgtgctcacatgcttagatattaatggcagttaatgtgatgtattattactctgcctctgctttttctcttgaagtctgtttgtctcatgttgttgttacacctgttttctttttttcttagcacgtgcctatggtatcttttttcattcctgcgttttcttttttattttcttttttttttaattttagttctatcttttttttaattatactttaagttttagggtacatgtgcacaacgagcaggttagttacatatgtatacatgtgccatgttggtgtgctgcacccagtaactcgtcatttaacattaggtatctctccaaatgctatcccgcccccctccccccaacatccctgcattttcaaacttcttagatagttttcaaaatatttctgtaaacaaccataattttacctaatccgaaaacatcttttataagtgaatttaaccaattcgtatttactatgcttagtgatgtgtcattttattttgtgtttcctacttataatatgttcctgtcttctctccattctttatctggttactttttaaaagaggctcgagtttcttttgctatttctcccctgctaatcatttgggagttatgtttttttaattttaattttctataggagaactcttaaattcatagcacccatatttaaacttctattttcctactgatgtctagagtttttagtatctctgttcccttcccaaaatggttttacttccctttgtctcatactttgttcctccaaccacttcactggccacaactcatatattgatataatctaggatttgggttggctaatttttaaatatattttttcttttctacttttttggcatagtacaataaaacttaagattaagcctattgtttctttttactttatttttcttaacattatttcccatctctctcttatttctctatttattttcccctgacagagtatataatacattaaatttttcagagtagattactaaatctttctgattacttacaagtctgtaaataactacatttttctcctaaaagttgaaacagtattgaacacagaattttaaatccaaatttattttccacagaacttcaaaattgtcttactgcatttagtgttgtggatgatgtacctgatatcagtctcatcgtcatttacctctagcttatcttttctcttcctgcatctttgagagatttcatcatttctgcatattttgtgtcttcagtgtcaccatgaggtatatttgggggtgtatatctttttcccccatttatactacgtggaatcagtggattttttcactttgaggactcaaatattcaggtttcagaaacgttcttctactgttactttatttccatccctccattgtctccatataaggttggtaaacctttcctttctattttctatatctctaactttttcacccaggctggagtgcagtgatgcaatctttgttcactgcaatccccgtctcctgggttcaagcaattctccctgccttagcctcccgagtagctgggattacaggtgcctgccatcacatccagctaatttttgtattttttagtagagatggggtttcgccatgttggccaggctggtcttgaactcctgacctcaggtgatccaccccctccccccaccccggcctctcaaaatgctgggattacaggcgtgagccactgagcccggcgtggtgttgcatttttaagaatcccttggctcaacacttcatctgagttttctttacaattcagctcatctattaagttttatttcaacaatcttgttttaaatttctagtatctgtggttaattatattttaggaacagaatatactctctcttccctctgaaaaaatcagtatgctgaagtcaggtcctgtttttcctgctcaccctctttccttgggtgtaagttttacttgatgtgtttggtgttcttccatgttctttgcattgcttaactatttggtgactcattgttgtatgctcccctgtcatgcaagatgtttgggttgtagttattgcatacataccatggtgcatgttgccaacaaggatgggtaaaaggaacgctgagttcttcctagttgcagggagccactctgaacagtgcctagcctctctttaaatgtcctactcactgtctataataaaactgttgcaggacttttccttagttcagctaaaaacagggttctttgtcccacagccatgaaaattcaagctcacaggcaatttaaatggcgagtaagacagggtttcattgggtaaaaaggaagaaaatggggcaacagggactcttgcaagcccagaatccctgctagagggcttcattctaggccactggaatcccaagttccacacagaaggaggaggggccagactcctctctgctacaaacattgtgaacaccccgaggccccacctcagtgggcaggctggttggagtttctccagggaccccctatgagctggctgtctcaaaatcagaagttctcttgttccccacgtggcccaaggggtgaggaacaaaggggtaggggaaagggagcctaagagagggctaaagagaggaccaagagctataaaaaattctggctattcctacgtgattctgcaacttataccctgtgggctcctcctgcccatatgttcaccttcaagcccatagtgcccttagctatttacagcaggcctctcttatgtattgattttggtctacggtttccttattttatctgttgccttcagattttaaaaaaagaatacacacacacacacacacacacacacacacacacacacacacacacacacacatcttgttattttgtaggatttggagagggaatggaaacttcccaaatgatcacctctggtatttcttgattatgatatctccaggtttagagaaaagaaagcaagttgggggtcagacaaagggaagaagaaaaaaacgtattccacatatttaaagtaaatcttctgcaaacacagaaatgcgaagtgattaaccatcctcaattgttttttcattttatatactaacgagctattctttttcatttttaggtcttgaatataatcatggccaaaccttatgaatttaactggcagaaggaagttccctcctttttgcaagaaggagcagtttttgacagatacgaggaggtaaagaagtgttattaatcttttctctcaaaacattctaataattattaaattttaattacagtattgagtaaatattctttgacataagtaagaacatctttaggatttataggttggagttgttgaaaagaggcaagttatgagctagagtaataatgataatgatactataaatttttgagcgctcactatgtgccagatgaccttctaaacattttatgtgtattatttgtttaattttttacaacaaccttacaaggttgttgctattaatattctcagtttacagatgggttttatatagtaacagtttttgcttaatgcagtgcttttggcagtcattctacatttaactttgtatgtgttataaatgtaatagtgattgaactttgtgccagtcattgctttgctcatttcattgatataaaccattttgaccaaagctttgcatgcctctgattctatcatttattgtctgtgcccttgcaaggtggtgatgactccagactttctatagagcaggggctttgggccaccaatctgttcagaatggctgggtaggtgaattaaagcctcatttgcattgtaaatgcatgatttttcttctgttgtacttgaatttgaggtgacttgggaaggagtgtataatgaaattgatgtttcctttaccaagaagttgaaagtaaaacatattaaaacttcatttagagtcagagttggttcctttcaaaatcaatgaaatgtatgaagtggctaattcgctgatcttcccagagatccagattgtcagatgcagaaactaggtcttctgtgagctgacatagcttaatacttgttgacttgatatttctgcagggtgcatctctagatttacaggatagtcactttttaagtaaacaaaattgcaaatgctaaggatggacctaaacatggttactattccttgtttgaattaaaatattgaagtaatagctgttcatatgtctgaaattaaaataacagtgaactgcattctgctataagatgaaacagaataatattctgccatccagagacaagcactgttaattcttatgcagttttcttctagtcttttttcatatttgtttttcttttttttctctctcccatggttgagatcatagagtaatatttttaaaatataaagcagatcccatttctcctgtgtttaaaatgcttccatcacttcccattgtagcgtaaagggaagttcacagaatgaaatacaaggccttctataatttggctcctgcttaattacctcaccttcatttctctccagtttccaacatacagcgtatgttcaactatagcaaaccacttacagtttcccccataaactattctactacatggtttgtttatgctactccctcttcctgaaatgtatttattccaactggtttgattggtgaactcctctcatctcagaacccagatgagaaatgtccacttctgtgatatcttccttgacccattgaatgaataagaggcgataacttattttttgccaccactaacctatccttgcatattttacactgccttcacattttatttaatgtttctttctctccaactatgttctgagtttcttgaagtcagggatcatattttacttatctttttctctccagggactagcagaatacctgtaaccaccaaattctttgtggatgtctagcatctaaaatgattttagatccagttgattccaattcagactaataattcagagaaggtaattttgaagagattacatgcaatcattggttcagtatatctcctactgttatgtaagaaaaagctattggagaaaaaagtacttgacaacagtgaaatgtgatttgatgaaccagagattcatttgaatccttcttattgcttgtgttttttttgattattaatcatcacagctcatattaggaaatactgatcacctgtgcttctaaaggcatttgcttttcctctggattcctctacaaactaggcaaagttagaagaaaagaacccttgaacaagtattaaataaaatgtaactaagctttcaactctttcaagtgctattttactaggattttgagcaaaaacattttaactttataaagcaaacatgcgtcttcatgataacataccaaaccacaaagctgaagaatatttcaagctggatgacagccagtttaaaaaataattatttcccactcctataagactcagttctttagagccagagccatgaaaacatttaaggcaacaacatgtaagcagaaaaggttcgtttctatggttggtacatgaacagccatgagggattacagctgaaagccagtgcgaggaataagattagagaaacaaaacccaagcatccctaaagtgtcatagcaaaggtaccttttgtgaaggggcataaatgctgtcagcaccatatgataactaacgttatcatcatgaactcaaatagcaggtaaacataaaattgtattccatgtatttgtttaaagaaagcagctgggcacagtgtcttatgcctgtaatcccagcactttgggaggccagggtgggcagatcagtaggtcaggagattgagaccattctggctaacacagtgaaaccccatttctactaaaaatataaaaaaaaatagccaggtgtggtggcacatgcctatagtcccagctacttgggaggctgaggcaggagaatcgcttgaacccaagaggcagagggtgcagtgagccaagatcacgcccccacacaccaacctgggtgacaaagtgatgctgtgtctcaaaaaataaaaaaaaataaataaaaaaagggagcagggagtaagcagtcagtaggtgggggaaaaatgtttaataggcactgttttaaaaatagtcaataaatgtagtaagtgcaaatgcatttaaagtttattttattatttctgcattactgaagaattatttttgaggcagccagatttttacaaatgacctaagtggtaggctgtgattgtattgccatgacacttctaattctgtacttttctaactttacttgacttacacgttacttaaatgcaaaatatattttgtttcctaagtgatgcttaacattaaatctttaaaagacagattcgtctcttgtggaggagagaaatagcagtgtttttaaaaatacatgcaacccagatatctctaactcaaccagccccctgactttcctataatatccacatcaaagatctgaagaacccattccctggcaggtcagggccttcccagtctttcctagaattcctaggtgcttacccacttttgatgatgacttatgtcctcaaatgcttggctaccattcagtttccaggactgttgactactccaatttgtttccttccctaaacccactttaacatcaaattccagaaatacaaggatgttgtataaagtagactttttactgaagatttagtggcagcagaggagaattgcatcatacaccacaccaagacaactttaagattaaaaatcggagatcatgctgaataagtttcattagccagcccaaccaggagtgtctctcttttttcttctttgtccctctcctccatcaagattcctgttcctgtttcctttattttattttaatcacactcagagtcctttttcacttttccagatacttttttcttaactgtcaaacattttctgtctctcaatctaaagaagaaaacttcaaaattcaagtccctcctcatcctggagctgtttggctcccctttcacctcaaactctcctactcagactctcctgagatcctcccttttgcataagcctgaaagtcaaagtatgtccttaaaacacacaaaatctaaaaagagctttattcttaagaaggagactgccatcatagataagtgttcaccaacagaactttccacaatgatagaaatggtctacatttgtgttgccgttatggcagccacatgtggctgttcagcatttgaaatgtggctactgggactgagggacttaagtttttaatcttacataatttaaattcaaattcatataggtacatgggcctagtggctttcttattggatggcatagataatcaactcaaactacaaccagattttaaaattccattctcccttcttgacactaagaagcattctcagtgcattccgttggaatctccagaattcatcagccagttcttcttaggggcagccagagcaggggttcaaatgttttatggatgactcacctcagccactgacctcgtctttcccacatcataaatcccagctcgggctaccccttcttcttgcccatgggactttcttgtatctgagtccagctgcctagatggagtcccttttcctagcaaagtcttggtcttcttggtctttatactagcctccccaccttccaccctacacacacacacacacacacacacacacacacacacacacacacgcacgcactcacacacacgtggtggaggaaaactgagacaattattgcaggtgtcaggatcaaaggagtatcaaagtgcagggtcaatacaaacctaaagtcaggcacagtgggacaggctgactttggcctctttccaaggtggttctgaaatcaaattgtgagcagccacaccatgaagctcagaaaagctcaagcagcctacaccccacaggctgttcatcagcaaagcaaagcgctttccaaatacaattttcaaaagacttaaaaacacaagcctcatataaagtattttgattaaaagatatatttaactaatcagggaggacattagcaggatgataaagctagttccaagagcacttgaggaagagaattttacgtaggaaaggaaaggaaaagtgaagtaagttttgtcaattagatacaaaactggctaatgtcctataaggcaataaaactctaacctattatagatttgcctttttctactggacacaagtcatctacatcattatagaataacagcagaaaaatgctatctattaaacttcgaagaatctatgtcccaaacaacagtaaatagtaggtcaaaccaaaaatacatttttctatagaagtaaatcattcttaggtatgcctcttcaatcatgctttgatgtaacaatgaaaagagggatggccatctttgcatattatttttaagcttgagataatttaaattcaattataaaacaatgtccagatatacctgtatttacactaaaagatacttacagtcatcaaaatgataataatcataataaattagtttttcaactgttataatcaacctattagtttttcaacttttataatcaacctaagggtagagaaaacatttaattatttttgaccaagcataacaaaaaagctgttacctttatctatttaaagtaagggtgccagacagatgctggaaattagaagggacttggagaaacagaggaaagtccagaggctttatactctcagcaagagggaaggttggtagttgatgtacaatagaggcttgcagatatgatttaaagtataaaagtagccaatcacaaaccaaaaataaaataatttcaaatttggagttgggggagaaaaagtagtgaaaatgcgttaagtggagttaaattgctgtgtttttattccaagaaaccgatttctgcatattcctggtggataattagtttagttactggctgtcttgccatgagtcctgttttcttaagctcctgtctctattagagttggacatatggaacagaaacctgttggtgccactttattatgcactgcagtaagtactggcttcatagtttggacggcagctgtactcaccgctataccaccaccaccactggctgggcttctcagttttaaactctaggctttcagcatgtggccctgaagccctttcactctcacccctccactttcttccacttgcatattgtgatgagaaaggtggtagaatgatctccttgtggtgtgagaggagaggaaggggcagcagggctgggggactggccccagaagcctcaatgaggaggcccgtttcaggctgagtcttgataggtgagtcagtcaaccactcaaagcacagctaagaggaagggagaggccagggcttctgcaagggcatgagtatgacagcacattctattgagggggtaaggggattattcagctagggcagagggtagggcagtggagtacaggggtgaaggcacagagatggccagtgtccacaccatcaatgggtttactttccagcccagggcattggcatttgattcagaaagctctagggaacctttgatggggtttcagcagggcagtgatcagttctggatgaccagtgacaagtggatgtggctggattccttgtgggagtggtctggagggtagtgttgggcttgaaggacttaatggacagtcagtcacacatatggagaaatacgggaggattttgagtgtaggaataaatgagaagatttttctaacctggtggatgtagagtatgtgagagaataagtgtagaatgaggttggaatttctagcacgggaactggacagctctgatgcaaggtggagagaatgccagagaagggggtacatgtatggatgcatttatattgtttctttctgaaatgacgaagaaccaaaagcaaaagtgatatcttctgtagtacctaagaagcattttgtatataatcacattaatactagttaaaaatacattgaatagaaagggaagaacgtaataaatgatccaagaggatgaacacatgggcgcatcttcctctctcagtcctcttctctcagggtgattgttgctgcctgatgggatgaaggaatgaggaccccaagaccctcacagccacaggcttccttcactcaccctcttatgtgggtgatactgcattcctcagggtagaggaattttttttttttttttgagacggaatttcgtgcttgttacccaagctggagtgcaatggcacaatctcggctcactgcaacctccgcctcctgggttcaagcaattctcctgcctcagcctcccaagtatctgggattacaagcatgtgccaccatgcccggctaacttttgtatttttagtagagatgtggtgaaaccccgtctacataaacagaaagtctatttacacagaaaggtttgaggaaaaagaacctctgacagaatattctgaattataattaggggtaagatcgtaaatgtgtatacttatatgagtctttcacacactctgtatattgtatgtgaattatcatattggaatcattaggctacaacaagctatatagcaacttaatgatgataaacaatcttgagtacagttggccctttaacaattcggaaatattttaaagacattacaacttaatccatggtgcgaaccactgctctagaaggctgagataaagcaatgaacaagacaaacaaagtctcagtcctttgggagtgtatggtccagcggcaggagaccaacaataaaccaataagcatagaaatgaatggcttccagcagtgttcaatactcttatgttactaaaaggagtgatagagggatcagagagacaggcagacattgaggagtaggggaggggacattgctgtgggttgggtggtcagggcaggccctattcaggaggtggcatttgaagttgtagctgaatgataagaagtagctagattggccaggtgcggtggctcacacctataatcccagcactttggtaggctgaggcgggcacatcacctgagatcaggagttcgagaccagcctggtcaacatggcaaaatcccatctctactaaaaatataaaaattagccaggcatggtggtgcgcgcctgtagtcccagcaactcaggaggctaaggcacaaaaatcgcttgaacctggaaggcagaggttgcggtgagctgaaattgcaccactacactccagcactccagcctgggtgacagagcgagattctgtctaaaaaaaaattaaaaaaaaagagccagtttggccaagaactaagggaaaagcattccaagacatggaaacagcaaatgctaggctctgaggcaaacatagtcttggcatgtcgaaagaagagcaccaagggtggagtgagcatcatggtcagggcatggtaagaggagaattctgagaagcaggcagaagcccctcatgtggagcagtagttctctcaaagtgtggtccccaagccagcatcatcagcaccacccagaaccttattagagatgcgcattctcaggcccatcccacggacctatggaatcagaaactccaggaactggcccaggcgtatgtgcattaacaagcccttcaaggaagtccggtgcacacttaagtacgagaataaatggtgtagaaccaggccgaggtgtttggatttcgttctgattgctatgggaagccattttcaacagggactggcatgatctgatttatattttggagacagttactctggaggccgtacaaaggatgattcgtaggcgggggccaaaaggttggagaagaccaggactttaaggaaggtgagctagaggcttaatccttccttttcctgactatgtctccatgggcgattttcttaatatctctgtgccagaaaaataggatatgttaaggtggatgggtcgaagaatatcagttgttctccttaggattctacgagtctgcacacacttttcttgtcagcacagctgtgtgacttcttcctgatgtgagaagaaagccaaggccaggcatctgagcaccacctcagttggcccgaacactgaaacaacccaaagcagcaaaaactaagatcagccagatttttgcaaagaaaaacccaaaacaacattcaggcctgttccttcctctagaccagcctttgaaataacagtgctgataatattatctggtctctcatgctcccaaagctcagagctcattgtcatccaagcatgagacctttaaggaaaggtctgtattgtaggtcatctcatgctgaaaagtcatagaactgggtcagcatactttttctgtaagggaccacatattaaatagtttagattttatgagtcctgcagcctctgttacagctattcaactttgtcattgtagcccaatagcagccatagaacataatatgtaaaaaaatgagcaggcacttggattagaagacaaacaatgccacatagaaatgagtaacaaattggttttgatggtaatggtagtaatgaaataattctagtttcaagtaattatttttactcctcgtgttcttttactactgtgttgtatttttaatttagtcaccctctatttctcttccttatcttgatagatcattgtatcagtttatcaccttttgctgcatacataacagactgctcacctttcttttctaagatgctctcatttttgtggggtagggcaggggcttgctcttctcattttcatgtctcttccctctctgaagtttctttgggcttgcttttatttcttcacaaaagtagaagataactctatttcctggaggaatggaagcatctcccccatgaaatagtgtctcagtcagtttcatggaaaatggtaatccttgagatccatgcttcaaggatgcaagaaggacgtcttattcatggaaaaatgtgagatgcatccattaggaaactagacagggaaatctggggtcccactagatttacaaggagcttgtggaaacaacacaagacaggaagaaagtatggaaaaaatatgggcaattaaattaaaatataagtgtaagcacctaggggttcttgctgccagctgcacaaagaaagaacatggcattgtagtaaagaaagagtttgggcaggcgtggtggctcacgcctgtaatcccaacactttgggaggcaaagatgggcagatcacttgaggtcaggagttggagaccggcctggccaacatggtgaaaccctgcctttactaaaaatacaaaaattagctgggcttggttgcaggcacctgtaatcccagctgaaaatacaaaaattagctgggcttggttgcaggcacctgtaatcccagctgctcgggaggctgaagcagaagaatcacttgaaccctgggacacagattgcagtgagcccagattgcgctattgcactccagcctgggtgacagtgacagagtaagattctgtctcaaaaaaaaaataaataaaaataaaagagtttaatagagacaaggccagccacaccacttgagagatgagttagtattcaagtcatcttgtccaaagctgctagtttaggggttttttaaaggcagtttgagggaagaggaggtgcggggtctaggcttctgctgattggatggggcagggatgaaatcatgctgaatcgcttctgggtggggccataggagtggggttggcaagtccaggtgggtccaggtggagacatgggtgtgaggcatgcaaaaaaaacctgaaaagatatctcaaaaggccagtcttagtttctacaatggcaatgttatttgcagaagtaactggggacattgcatgtcttctaacatccagaataatggctgacagtcatatatgtctgcaccttagcaggactcaggccctcctctcaaacagaagtggttggtttttgggcaatgcctgttatcatttaaactgtagcctaaacatctcccaaagttaccttcatccaaaagcccaggaataattaaggaaaaggcaaggtgggaggtgggttagcttagctaactgttataatttttctcactgatacaatttttgcaaaggcagtttcataaggaactagctgaggatctacttaggtctctcaagtactactgtactatgctaaagaattaaacacaatggctaaaattacagtgctgattctctattgcttcttctcaacctgcagtataaagagaaaaatgctcaatattagctacctcaagccgtgtctgtgggccgcaggtgaacaggagggtgttggccagggcatccttttaattagggttgatgagtgcagtcttgcagatcatcaggctagtggtgaagagaccctaaggacatcctggtttcattctctttgcacacctctttggaattgcactctcttaatgcatgtggtgtagccattgaattaacagagttcattcaagtgtggacaaatgaacagtcagatgaaatatacagcacatgttaaaatgaattcttttttctgttgagcagtctagggagaagaaatttttttaaaaaatcaagttaataattttgaagtcccttctcgattgataaaattgcacttctttaaacctgtgcaatttcatgccactgaattccctattcctgaaaattttcagaaattatttttgtcattacttgttttggttgtttttgagagggtgctgtattagtgagggttctccagagaaacagagccaatgggatatatagagatatataggtaggaagagatttattatgaaggattggcttacacaattatgaaggctgagaaatcttatatcgtctgtctataagctagaggcctaggaaaacgagtagggcagttccagttcaaacctgaagggccagagaaccaggggagccaatggtgtgtaagtgtcagttgagtccaaaggccccagaaccaggggcatcagtatccaagttgaatgtcccagatcaagacagagtgaattcattcttcctccaccattttgttcagttcaagccctccgtggattggatggtgccctcctgtattcggcagatcttctttattcattccatcaattcaaacacaaatctcttccagaaacagcctcacagacacacccggaagtaatatttcatcagccatcagccttagcccagtcaagttgacatataaaattaatcatgacaggtgttttttagcacagacagtagtaaatcactactactttgagcactcactaggtgctggaccttgcacttgacaaatggtataaatgatcaggaaagtatcctgatctagaccctaagagagaggattcttggatctcgcccaagaaagaattagaggtgagtgcacagagtaaagtgaaagcaagtttattaagaaagtaaagaaacagaagaatcgctattccataaacagagcagccctgacagatgctggttagctatttttatggttatttcttgatcatatgctaaacaagtggtggattattcatgagttttccaggaaaggggaagtaattcctggaactgagggttcctcccctttttagactatatagggtaacttccggacattgccgtggcatttgtaaactgtcaaggcagtggtaagaatgtcttttagcatgctaatgcattcatatgaacatataatgagcagtgaagacaaccagaggtcactttcttctagccatcctagttttggcagcttttggccggcttccttagtgcatcctgttttatcagtggggtctttgtaacctgtgtcttgtgctgacctcctctctcatcctgtaactaagaatgcctaacctcctgggaatgtagcctagtaggtctcagcctcgttttacccagccctgttcaagatggagtggttctggctccagtgcctctgatttaagcattatttcacttaagcctcgaaacaaccctgttttaagtaggtctttttagcttccttttgcagtttacaaaactgaggattaaaatggttaagcatgttgcttgaggtttcacaggctggttacagacttagcagaaaaatggcctgccagctagcctacagtggatctccaagtatggtttcagacagcatcagcaacatttgtgagcttgctagaaatgcagattattaggccccaccccagacctacagaatcagaaactctggggggagggtccagcaatctgtgttttaagagccctctcagtgattctgatgatgcagctcaagtttgagaacctaggcctagggaaaggtaaggaattgtagacttactagaaggaaacaaaattagatccatttaaagttctttacagctaatcttcctcaaacaggcaacacagagaaaagggtgaagactgttgaataaaagagacttctttatctaggctgaacatattagatttattgaacccttgacacagtgcaaagtacttgacatcagtcatctctttaaaccctcaggtggtggtgagggctaaatgagattttccacagtttacagatgaggaaagagaagcttaggtcacttaagaattgcttgttaatcaacatgtagtacgtgatggagctagcgtccagaactaatgtattgctaaagagaacatacacaggtcacacagctttatgacccagaatggctgtcagcagagaaacatgtttttgaagatatatatgatgtataaaatacataattaaaaagtctttctaaagttcattaataggctggaaccaaagacctgtttaactttttactcaccgtttgcattacttattctagaccataagtattatactactaagtctaggtgtctttagtctagttctcttagggaaatgagaatgggaagactgtatttttcatataatttcccccacattccccaaggaaagtgtttaccagggcttttttaggttttttgttttttgtttttttgagacagacggagtctcactgtgttaccaggctagagtgccgtggcatgctctgggctcactgaaacctctgccccccaagttcaagcgattcttctgcctcagcctcccaagtacctgggactacaggtgcgcaccaccatgcccagctaatttttgtatttttagtagagacggggtttcatcatgttggccaggctggtctcgaacttttgacctcatgatctgcctgcctcagcctcccaaagtgctggtattacaggcgtgagagccactatgcctggcctttcttttttttctttttctttttttttttttgatacaggacctcactctgtcacctaggctggagtgcaatggcacaatcatagcttactgcaacctctaactcctgggcttaagcaattctcctgcctcagcctccctcccgagtagctgagattacaggcagagccaccacacccaggtaattttttttttttttttttttttgtagagacagggtctcactatgttgaccaggcaggtcttgaactactgggctcaagtgagcctcctgctttggtctcccagagtactgggattataggcatgagccactgtgcctggcccctagtctttaatttttgaggggggagaaaaactaggtaaaacatactatatggaaagattataatattttctttcaattgatggacatagacataaaatattgtcagcgagaaagcctatctttttaatatttattttgataaactaacaaggagcatataatttataaaatactttctcttaaagccataaatagtaagcacttgctccgaaatgctgctttgtcaagaacgttaattgaagcagatgagcagagtcagtatagcttcccaggtccagcctgcattccctttctactgcagagttacgctgaggacagcatgctggcacctccacggctcttctgctgtcaacttttcttctcccaagtacctgaaagggcaggtgatcctcttaactttgtagacatgtgaaaaggagactagtttttgaatgctcaccaaaagccaagttgccaggatattgtttgcaaatacagaaagggtttttgtactaagtggtatttaaggcaaaatctttgccaaagaactctatccaaaagcttgaaatacacatagttggttaagggaatgcatttggagttaaacagaaataggttcagttttggctttgctactcaagagatgtgaccatgagtcagtcttaacacccaccaagcactaagccagagcttccttgtttgaaaaatgggagtgataatacctacctcgcattgccatcataaggaataagtaagatggattttttaaaaatggaagtcagattatgcccttcttttggtttaaacctttaatgggtttctacctcattccaagtaatttccaaagttctttctgtgtcctgcaagtcccctacatgacctaccatttcgctgtcccattgatattccctgagcattctaggcacactctgacctcagggcctttacacttgctgttctccctctggactactctcctctgtacagtcctcatggttcacttcctcacttcattctgtttctgctaaaatatcacattctccaagaggccttcttactcacctacacacacaggctcctgacccttctggatgttttatttgttacatttatcactacctgataacttactcttttttgttcattgctgaagtccttctagaagataagccctgagagtagactttgtttcctgctgtatccccaccagggaattaattcatcactcaacatatttcataagtacctactatgatccagcaattccttagttacttatctgagactgaaattcattgatatttccatggttcctaatttttaaggaattttaaagccccaaagaactggaactgaaaatgtcactttggaatgtggagaaaggttaagccagagacactatctgtggcagctatggaggtgtgtcgcttaaatctcccttcaagagacagctgccccaggagtcccctcattggacagttttgctgcaggggcttcagcaccctcaaaatgtccctgcccaggctgtactgaacatggcaagctgctacaaccgggcctttcctgcccaagtgaggctcctctggtgggcgttctgtgctctgcagctgcaatccagcaatgttctcagctgtactgcaagctgagacaattcctccccagttctccctgctccctcctctcctctctcaggtgtttgttctgaggtctggtttggaggctctccctgtcactcggtttctctcccctttctctttcacaggcatttgccctaatgaattgctcacatttccaattctgtcttgcctgtaatctcagctactcaggagggaggctgaggcaggagaattgcttaagcccaggagttagaggttgcagtaagctatgattgtgccattgcactccagcctaggtgatagagtgaggtcctgtctcaaaaaaaaaaaaagaaagaaatttaaaaaagaaaggccaggcatagtggctctcacgcctggccaacatggtgaaaccctgtctctactaaaaatacaaaaattagctgggcatggtggcatgcacctgtagtcccaggtacttgggaggctgagggaggagaatcgcttgaactcgggaggcagaggttgcagtgagcccagatcatgccacagcactccagcctggtgacacagtgagactccgtctgtctcaaaaacaacaacaacaacaacaacaaatcctaaaaaagccctggtaaatactttccttggggaatgtgggggaaataatatgaaaaatacaatcttcccattctcatttccctaagaaatgtcttgggggtttgtttctagatggagaagcccttccctcagggtaagaggtcctcaggataagcctccaggactctgctgccatttcctgaggccgactctgagctcactgcagaattctctaggtggtagcagtggttcttgtgtgatgttccagtaattgctgcacttattttagacacaataaaaagtgacagagccagcattgaccctaagagccagtggggactatgtatcttcaaggcctaaatataagctatttcagaagacaaaagtccaactggagtgacgtatcatgcagctcttgtggaaaaaaaaaagcattttcaaaagctgcattatttaaatgagaaatgcatatatttaaagggaagttccataaaagtcatttgagattccttttctttcaatgactgtattcagcattgtctattatctccatatatcaatagtttaaaatattttttcatagacctgccttttcagaaacatcttctatgtcactgtatttttaattacttgctcagtgtaatttattatgctggaactaattgtgttttaattagaaatgctttgctaaagagaagaacttatcagtttgcggcggtgtttccggtgcaactacaaagcacgtctcctgtttttcttaggatttttttataaggggacagccacataatgtgtttttaatatttgttgtaaatatttattaagaatcctgtttacttgcctccataactctaagttgttcctctttaatttttccttattttagttgctaaggcaactgttttgactactgtgacagttttcctgcccaagaaagttactttgagtgaccacccactcctcttgaaaacacattttgctttctccttccttctgcactctgagaggtagttgttgaatattttaggaataatttcttcacctcttttctggcaagagtcagggaaccctcccagaatctgagcatccagattttgcctcacaatcctcacagcagagacacttcagggagggaaaattacaaacctagacagatccggagtgttcagccattcaaactggcctgcctcacaaatcaagtcccaaagatttaacatctatatcgtcaagtaaaagataaagtgggaatccctagctattagtgaccataaagtcaatcgttagaaacagtttggcctctcccaggtggctaatctgggcatttcatttctcccccagattcaatcatagttaagctgattaaattctcaaagaaccaaggatatttctgagaccttgtatctaagttctttcaggctgctataacaaaataccatacactcggcagctataaacaacacatttatccctcacacttctggaggctgcgatgcttaacatcaaggtgctggtagattcggtgtctgataagagcccatttcccgattccaagatgacacgttcttgctgtgtcttcacacggtgggtgaaaggggcagccgtctctctggattcttttataagggcactaatcccatttatctcccaaaggcccccacttcctaattccatcacatttgggattaggatttcagcataggaatttttggtggggtagagcacaaacattcagaccataggaccttggtaagcaccatcaggccaaattttattttattttttaaatatataatatgagagatcagaaaagatggtgtaccttcctttgtttcttttcaatagccttcatccactcttccaagccaggtcacttagaaagttgatgatgttctttattcctgaggtaagaataaaatgaaaggggtggattaaatctttctacttgacaccagaataagcgttctctgtatctcactgtcattgctggaatgagcactttaaatgctcatggttgattactgagggagagacgttttcatttttgttcctattggttttgaaatgaaagatagacagcaggtttaccaccttttgaagttgctgaataactcacttcattgccctcttgtcatctgagaacgtgctctgtcgtgtcagggaggtgcagggcagagtctccccaaccaggaatgacctcttctgttcactataccccaacatgcacttgaaaataaaaactgtgttgtgatggctcgtctgtggcagcagcttcttggcctgattgtagactgaggccagcttaggcagagtgggatggaggagttggagcaggaacaaacagaagatgaccttctgtgcagaaaccacattttcaacaagtctaagtcaacccagagttacgaactctgggtttcccttatgcttagctttgtattctagctcactggaaatagacatgcactaataccattgctctttttaaagatctgtgtaacagaaatggattccctgtcaaaatgtatttgtatttctgcctcatattatatattatctgcatcctcttgggtgacttgcctcacctcagttaggaaaagttttctcatctgtaaggtagggatggtggtgtttacctcatttgtctttgatggttaataataatcagtactagcaacattataatgattattattactatgttttatattaataatcaatactgggccaggtgcagtggctcatgcttatgatcccagtgctttgggaggctgaggcaggaggactgcttgaagccaggagttcgagttcagcctggacaacatagcgaaactctgtctctacaaaaaaaaatttttttttttaattagccagccatgatagtgaatgcctgtagtcctagctactcatgaggctgaggcaggaggattgcttgagcgcaggagtttgaggctgcggtgctatgattgtaccaggagtttgaagctggagtactatgattgtaccactgcactccagcccggatgacagcaaaattctgtctcttaaaaaaaaatcaatactggccgggcgcggtggctcccgcctgtagtctcagcactttgggtggccgaggtgggtggatcacgaggtcaggagattgagaccatcctggctaacacagacaaaccccatctctactaaaaatacaaaaaattagccagacgtggtggtgggcgcctgtagtcccagctactcgggaggctgaggcaggagtatggcgtgaacccagaaggcagaggttgcagtgagctgggatcatgcccctgcactccagcctgggtgacagagcgagactccatctcgaaaaaaaaataataataaaacaaaattaaaaaatcaatactaatttacttagttcagactatgtgtcaagtgctctaatgcccagaaataacctgtgagataggtattgtggttgatgttgttgtctctgtttttagagatgaagaaatgaatatctaaccacatttggatcaggttcatctaaaaccctaaagcctatgtaaaatacccaattgtttctgctgctggtgagttggtttttatgcttacatgtttctctcaccttccacaggaagctgtaatgtgaaatatgtaccaccagataaaataacggaagagggatttagattgaagggaaaaaagtaaacaagggagagtacatcaaatgaggggtaaatttagcaggcagcaactcaacaagcagcgaaaatgatctgtaaagttgaaagaggtgagcctcagatttgcttctggtgttcctggtggctaaagcaatgtagaaaacacaagttgttgtagggttcacagtgtccattagattgtaaggaaagcaacaggtcagtaggaacagagtttttcctggtcctaggatctgaaaaaaaattcttacagaattcttacaaaatacactcccccataaaaaactgtaataagtacagaatgtttcagtagtacagttgttcagttatctatgtggtaggattcacggggaatccataagaaatgcagtaattaaaaccaaaacacttcagaaacccatctgatcctttgtgatgattgctggcatcagtggcaaggagaatagcagaggcttcttcaggtatgactgctgagcagttacctgagccgactgctgagcagttacctgagcccactcctgaacactgtcagtctttcatgtgtcagcctcaaagcaggtgtagcatattgttcaaaacatttgatctgcatgcctcaatgtcctcacttgtaaaataggtataaatagtgaagcagcgttgtttgtctggggtaatacccgaggttcgttgtcccacagccatggaaagctaggacgtggacacatcagagtgaggttaagagtggaagtttaatagacaaaagaaagagaagagctctctgcacagaaagggctcctggagaaaatgggttgccacttccgcagtgaaatgcagaaagtttaataaatgaacttaaggagggggtatgtgatttacacaggggatgaaagatcggttggaggaggcatgccatttgcaagtgtgcaaagaagctggccactccaccctaatcttttattatgcagatggttattctagctggctggtgccatgttgcctcgtccttattgtacacgtggtgacaaagaaaagggaagatggagcctccgtgttgaacatacctggcttccaggtagccttctcttggcgcagctgccagcattcacctgtacaagcttccagcttgtttatctatgtctgtagctcggtttttcaggctgctctttgttagaaaagaaatgatttgggggctacttttattaaaagggaagccttgccgaagactccttgtactgacactatctgcctaataatttctttctagctcctatatcaataataaaaatggtacctccctcataggaatgttgggaggataataagttaatgtagagaaagtacttagagcgttgcctggctcttaggaagcactgtgtatgttacctagcaatagtaggcatattactaggtgccacaggccttttgaattgctcatcaggagactagaacggcatctccctgttggattccagctgagcatcagttactggtggaagggggaaaggtctatatttaacaacttaacccaataggaacatctgtccaaagaatcaaaggccatcaaaaggaatgcaggagctacacatgctgttattttgtctgacagattttttcacaaggtaatacttgtagcacatagcaagggtctgtgatggagcagctacagccgtgccctctggctcctcatgtggaatgtgagctgagaggcccagtgtcctttatctcctgggatcttaaagcagataggagaggcacaaatggaatgaacattctatatccttccaagcaagagaccaagctcatgagggtaaaagcaacttaataaggacccatgcccatctattacatcagtccataaatcattctgatggcaggatgttatcactgagggctttagtttaacttgaaaaaaataaaaatttgtggttctgagagaggcggtgtttgtgcagaatcacaaaggatctgctaggtatgaagcttaaagcatttccctggaataaggagaggaaataaataagccataaagcatctcttgggctctgagctttcaggatctgatagaaagctagacctcttggttaattccaaaccagactccacctgctttcccagtctgaaggccacacccatcattctccctggtttatgaggtctctttggtggtagtcacgcataatgtgatttaaattgaatgagatcctttatggcctcttcctcagactcctctttgtttctctccaaccttgacaaggtctttttaacttcctctccattcttatcaaaccaggaagcaaggagggtgagtctcatatgtacctagtggagtctacctaggcagtgttcgtttattgaccgtccaacaatcttctggcgataggcagaggggccctgcttggtcaagtttgcccaagtcagacaggcatgggctttggaatcagagaagctggcttgaatttcaggtttgttactatttgactgtggctttgaataatttagtctcctctgaacctttttccccccttctctctgaaaccgcattggccaatatggtaaccactaaccacattgtggctgtttaaatgaaaaattaattaaaataaaaaattcagcacttggttgcattacccacatttcaagtgctccctgtggctcatggtgaacgtattgggcagaacccatctggcacatttccatcatcacggtaaatccgttggacaatgttgatctagtctaaaaccttgcagagttatcatgagatttatgtgagatagtatttgtgaaatacctcacaacaagagccctaaaattgtagctattttctcataagtacgaccatttagtcagcatttactttgtcccaggtacttagacattctcaatattaattctttgaaagccctgtgagtcggtatcagttttcccagtttacagctaggaaaagtgaaatatggcaaggttaagcagaataactgcaagattctccagcagttgcctggtgaggaggctgacatgcaaacccaggaaccaaccactacaaggcctggatctcaaaaccactgtggactgccacctcttctgaaggttttctttcccagaaaacgcagttttgtgatggaatgtgaatgcctactccatttcacatttctctacgtcctaatgtatctgtccagtgacaaacacagaaaagcccctggccaactcatgtttaaataaggtagagttaaagcttttatgatctggtccaaaatagctgtccctagctggtaataagacttgactatgccctatttgaagatgccaactccacagtataagatacagacatttgcagttaacttaggaagtgatggcgagagagagggcaagagagaaagggtaagaaataactacaactcacaattaaaataaaatcagctaccacttagctgtatccccatccaaggaatttctccacttcaatcagagtatttggcctgctgaactctctgacattccttatgaggggattaaactttattgaacagaatcactttaaaaattgaaataaaggaaaaatgtttaatgttagttgatttgaaagtaacttgaatctttgaaaaataggttgtgatattgattaatgttgaaacagcatgtgtgagggaaaatatactaaaaataacacacaagtgaaaaacatactctatctttgataagagagggaagtgtctctgtaagcctgtagtggcacaaacccctcagagtggggatctctgagccagaaatagcttctagcaatggtgatctccagcaaaagtgattctagactctcaaacagaatgccctctggcctctgcttaagtagtttcacaaaaggtgttcctgtccctttctagccttgctctctagtggcctaagagttgggctggatgagctaacgtgtccttgagctctaaggcgtgactgatgaattttaactaatatgagaattaaaattctgcccaccccccaaggaagttctcttatggtttgtttctttaccagaaaattctgttaccatttaactgcaaaacaaatagattcccaaaggagaaacattccagctttcttttatgatctcccctgcagggcccagatctggaggaggatttttctgacaatgggacttcacaatagcctggcctcaatctggtcagggagccatagcccactttcaggtcaggagggattcatgtgaaatttaaaactgctgttagggaaaaaagaatagacatgatgtgtctttactcaccagagggtagggttattatgtttgttagtaggaggtggtgagaaaccaaattagattgtgttttagttcctttcagctgattacctctcatccctcagatttgctctgtgaattttcatgggtggtttgaagcatttggtccaagaacctttcagccacagttgatgagctgattgtgggttttgtcgtgagcctggtctttagtgtcagctgggtttcattctaagatccccctggagaatttctattctgataattgcttctcttaacaactgatacgtttttattttatgagctggatgggcacctggtaaatattttttttcccttttttgcttttgttgctggggagcccagagccaagttgctatcctgctataactgtgtaggaccttatgacaggcatttcagagagctgccttttactctggccttagtttactattccactttatttttcttctctttgcccagatttctcatcctattttgaaaatgatttcttcacagtgtcaaacagtgctcctggttcaataggaattcccaggacgtgcctcaaagtcacccccaacctcgaagatgagtttgtatgcattacaaaaagggactcctgcctttaggcagacggcctcaaccagtgcccttgtaattgcacttctatccttggcagtcttccaaggacttccttgttgggttctgggcctgatgcagccccctcaatttgagcaacttcttgtttatttgttttacatattggcctgctgcaaaatcttttatttaaaaaaattcattttttcatttatttttaagttaatttgttagttttatggtgcttttgatgtgctaggtgctagaacacaaaggtaaacaagactgcttcaaggactctgccctcttggaggttgttgcattctggtgtgggagtcagtcagtaaatcaaggatcagggagagcctctctgaggaggggataatgaagacaaggtctgtagaatgaagaggagcctgatgcaccaagggcagtagaaagagacttctgagcaagaggaactgcaagtgcaaaggccctgatgctagagagagcttgaggggttgcaggaaaagagtttttatggttgtgaacaagaaatagaaggaagaacagagagtggcatgagataaaatttgaaggatcccagatcgttcaggaccttttcggccaggtaaggagttgggattttatcctaaatatgataggaatccattgaatggttttaataaattcattcaaagtttaaagaatcaatctggctcctatgggcagcagaaaaagcagaagtgagaagatcaatccatgggagagataatattggtttgggccaaggtgggtggtgatggagagggagtaaagtgggtgtgtattcgaaatattatagaagaagacttgctactgaaagtgagaggaaaagatgagggaaaattaaggatgactcttagtttcaataagtgaccagatgctagtgacatttatggaactaaggaagtactgtgatggagaaacttggaggggagagaataaagagttcagttatggacatacttatttcaagacatcctagtggagatgtcaaatagcaaatatttgaactcacagaggagaggatggggctgctcttacaaatttgagggtcatcaggaaatagatgatattgtagacacaagattgaatgaaatctaggaacacagtggaaatgagaattcccagaaccaagtcctgaggactatgtaaaagttgagtacagaaggaaaaggcgggaaattagactaaggtaatggagcacaaccaggattggagagtgtttcaagaaggaaggaataatcaaactctcagagatcaactcaggtgaggaaaggaaggtgtgcactcctattttgcagcatgctggactggccagagaagttttagagggtgatagaaatggaagccagatagagttgctcagatggtatgaagagaggtaatggaaacagtgaatatttctaagatattatgtcctgaagaggatcagggacatggggtagtaagtggggtagtaagtaaccattgagaaggaaatataagattaaacgtcactgttgactatccatttgaggtttataatcttgaatttaaactaaagccagacagttccattttgtgattttcaccaccaagtttggtgataaagtatgcataaaatagacttcgttttttggccaagaaaacactaaatgagacatggaagttgcgaaccacctgtgagggagtgattgcaatattgggctgctttggaaataagctagataaggatggaagtaaaaggaggagggaactggtgcgtagtgagagattggcagggataatcaaaagggatatttgactttgcaaagaagtcaaatataggaggggagaactgtagagctaggggctagaaggaccagatggaattccaagagtgagatattaggaattgaaatgtccaggtggtaatggcaagctctaggggtactcaggggggaaggaagaaaagaattttgtatttaaggaggccaaggaagtgaaagttcactctcaaaataagttggaaacccattcttatttattatttgtatttcatgaatcatctcaaatccttacttggaattaggtgatagggtgcacataagaatgatagtggctgattctttgtggatctactctgtaaacaccattttacgatgtacttttgtacactgtgtaccaaaattcttcattgccgtcaggatattcattgggatatatttggaaatgggctaattcttatgtcttgattagttgataattctcatttttttagtcagtaacaacataagacccgccatggccttttgggtaatagctaatgcttttcaggtggcacggaagacccttgcaatgaaacaactcttctatacatgtcccatcacaccccctgtcattctcttgaagtgctctagccacacaaacaaatttctaatgtgaggtcaatagctgctcactctgcctggcatgaagattcatctaaagtatcaacttctgggttaagccttttctaaaaggttgaactgtccaaaaatgccattttgaagggtcaaaaaatgtcatatactggcactttcatattgttaataatttgctaccactattacaagtctgaaccatgcattgttggtagagctattacttgctgaattggaattctgtgttatgtgctttatgttcaccatctcatttaattccagcaataaacccaaaaggtaggtggaactacttccacttgttagacaaggattctgaaatttagaaagggtctttctgggagagagtacataacaaatggtggaactgggttttaactcctaaagcaaaaattataccatgccctttcctttggtcttattcatggcaatgacagcagtacagagcacacgcctgatacagagttggaatacataaatacatacagtaatacttcatctgccagaaaactacccaaattgaaggctgctttgttcagggacccctaggactactttatgatggcctagtatcttggcattggatttaccttgataaatgttgttgttcccctgtaatttagaaagataaattttaacaggtgaaactaagagtctgaacggcccttaaaaccttaatcctgtaattactatttatttgttttaaggcactgccttgatccatgtttgccagacaggttcctaattgctggcattgaaatgatctaggaagccagtttcttcagctcatgaaaagaacatgtagatttgttgaagtgtgaatgctaagtattggtgtaatgcagtcagagggcacaggacatctatgttcatttcccaaatgccctttttctttcattcacatggatttttcctctcattcctaagcacagtggtgctctaataagacaagaagtcagttggcaagtgtaacacagatgctctgatgccttgaatttggctaatattgcttcttcattcaaacgtcattctgtagctttccctgagtttctggtgtcaaaattcaaagcaatggttgtcaaactttcgtgtgtgttcgaatcttctagagggcttgttggaacacagattgctgggtcacatccccccagactctgactcagtccatctggactggggcctcatattctgcaattcagtaaagctcccagctgatgttgatgctgctggtctagtgactacactttagctctaggggctgttcaagatgcgctttacaggacaccaaatgaggttagataaaaaagcaaaaatctcagcaaatatctgaatgctagattttacagacaaaaaaaaaaaagaaaaaaaacacaaaacaaaaaccagtgacttaaaaaataatgtatctcctgatttttgacatcagtgggctagaacttgggaatccttcttccaagatattaaggaaactttcttctctatgactttcatgctttcagtcagtatgctttgttcttaaacctatcctagagcaagatgttttattaaattgatcagttttacaatacaaaattgaaagcaaagagttttcaaaatgaaaacattccataatacaataagaattgtggatattacatacaaaagagtgatttctaatttgtttagaagctcagcaatattttcatttttattagattcaaaatggtgtgagtcatgaagatcaacacatttctttttgacaggaatcctttgtgtttgaacccaactgcctcttcaaagtggatgagtttggcttctttctgacatggagaagtgaaggcaaggtatggcccaagaagagcaagttgttctttctgctttgtggtttaagccattttgtttctcaacaagtagactgagtgctgttgatgaaccctacccttattcattcattcaagatttttaaaaatgtgcctacatgtgccaggcattgaagtatacagtgatgattaaggacattatcctcatagattccagtctaggagcaatgtcaggcattaaaaaataagttacaagtcattgaatgttgtgaaagagaacactggattgtcaaagagcttaatttaatcttgggagttagaaagaaatctgccagaagaagagatgctcaagctgaaatctaaaaggtacattaaaagtgtgttcatctcattataccctgggacttaattcgatgtatggtacagtgtccacatttaatgaacaattgagctgaatttaagaaaagaattaaagttatataaaaattagcatttttctcacatttcatgtacacacatgtatttaatgattattaacaatgttttatatataaaagtaacagattttagaaacatttttatattcagcattgcacatatatatgtctatatgtatgtatatatatatatgtgaaatggaatacttggggtcttgattatttctgattatttacaataattattgttacatggttttaattccctcttcaagctgactgtaatcagcactgccttcatcatcagaaatttttgccaagcagtttgcctgtatcataggtatggcataatttaagctcattgctgtgttgtattctctctcttcaggaaggacaggtgctagaatgctccctcatcaacagtattcggtcgggagccataccaaaggtacctgtgattggtatttgcttttctaaacacggatttacttatattggaaatggccatggcttctagagataaaaaactcactctttgtatccaggctacttaaaacatttgatctcagttttgagaatagcatgtggttgctggttgtggtaatgtcacatttattcacatgaaacctctgtgactctcctctggtgagagagaggctttgtggacaagcagaccctaataaaaggctcttctatccaattgccatattccaggtcctccaataactacaatcaaaactctaaacaaagaccctcatatctagtttctaaatcaaaaatttaggccagacacagtggctcacacctcccagcactgtgggaggcagagggaggcagatcccttgagcccaggagtttgagaccagcctgggcaacatagtgcaaccctgtctctacaaaaattacaaaaattagggtgtgttagcatgtgcctgtagtctcaactactcaggaggctgcggtgggaggatccattgagcctgggaggcagatgttgcagtgagctgagaatgcaccactgttcaccagcctgggtgacagagcagagactctgtacctcccccaaccaaaaaatttgtaatacctttcttatcagttgatttcaaggaatatatagtgttacaaatttcacctctacaggttttagaataatgctaggtgtctgggcccttatgtttatttttacattaaatgtggtttctttttaccacgtttcttcctccatgctctgtgatgtaacttatttttttttctatctgtgtacctctatacaggatcccaaaatcttggctgctcttgaagctgttggaaaatcagaaaatgatctggaagggcggatagtttgtgtctgcagtggcacagatctagtgaacattagttttacctacatggtggctgaaaatccagaagtaactaaggtagcttcagttaaatggcctccttctcttccccaccatgtatatatgttgtgtgtttaattttatgcgtgctatatttttatatacttaaattgtatggtaatttaaaagttagcattgctttgctgacatgtttctgtagaaaatcagcaattaaaatacccttttagcatgtcactcctgtgggccaacaacccaaatacctactacgatatgttgtagggatactagtccagcacttctccaacttgagtgtataccagaatcccctgagctcttgttaaaatgcagattctgattcaataggtctgaggtggggacaagattctccttttctaacaagctcccaggtggcatggatactactcatctgacaactacagtttgagtgacaaaggtctagatcagtaccacccagtagaaatgcaatgtgagccacatatataatttaaattgttcttgtagctgggttttaaaagtaaaaagatacaggtaaaattaattttaataaaatattttatttaacccagtagacctaaaatattgtcattttaataggagatcaatataaaatttattagtgacatattttacattcttttgctcatactaagtcttagaaatctgatgtgtattttcaaatcagactaaccacattttaggtgttcagtagctgcatatggctaatggccaccatactgggtgggcagtacgggtctggatggttaagaaatccaaaccccccctcccaataagttattaaaatattgggttaagatcagtcttttaataccatatccagcataccattgccctggcaagtgagtctcaaagagacttctcgaagaagtagaaagcctcgtaaatattttgtctgctaatcatgtgtttacagggtgattttacctctgtacagagctcccattatctttctgtaatgtgtgtgaaaaggactaagccttcactttccatggcagaaacatgggtttgggggaatggggaggcattttgtcttctcattaaccctataattggaaactcagtgtaggttgaatgagagagggttccaacaagtggaaactcagtgtaggttgaatttctaatatcattagaaatattgaattttagagctaacaggaaatgtacagggaagatcatttgaggacactgagattacaaaacttaaccatgaatccaggataacttatggcagaattgagttctgttgacccctaaaccatccaagctccattaccctcactcacaaagtatggtcctcattccagaagtacagacccctcctgggagcttgttacacatttgagtctcaggcccacccagatgttctgatcctgaatcttcatttttgacaagatgctccaggtgactcggatgtgtggtgaagtttgagaactcctgttttgtagctctggaggcagaagtggatgctcgatgtcacataagagtgtttggttctgtccttattgtggtggttttatgctatcgttcaggtcacctcactttgggagaacagattttgcagtgccttcaagttcttttattactcttctgagatcaactccttctctaattaccaattcatattacaagaaacaggatgatgcagtatgagctcaagtattggggctttggggccacattgcctgggttcaaatccttgctcgtccccttcccagctatgtgaagcagatatacgctggacctctctgtgcctcattttcttcatctgtaaaatgggaacagtactagaatatctgctcttaggatgattgtgaggcttacatgagttatgacgtgggaagcactttgtgtactgcctttcttattgaaagcccttaatatgtgttagctattaggatgacagaggccaagaattttagagttcgaaatggaccttaggaagggcttctcacctcatttttcagatgagaaaaatgaagctagagaggtaaaggaactctgagaccacacagcaagctgggccagagtccaacctaaaaccaggtcttctcatgccctatatgctgcacccactttgctctgtgccctgagcaaatacagtcctggggagatggctcaaatcagtaaatcccataatgtttttgctttccataatttggttgctgttagtcttggcccattctaagaaccacgttctgaaacatacccttgagtagattatggatgtgtactgttggcccttgaacaatgtgggggttagagctaccatacccctgtgcagtcgaaaatccatgtataacttttgactcccccaaaacttaatagcctactgttaactgaaagacttatgataatattaacagtcaattcacatactttttgtatggtatatgtattacctattgtattcttacaataaagtaagctagagaaaaagcaaatgttaataagaaaatcataaggaagaaaaaatatattattcatgaattgaaagtggatcatcataaaagtctttatcctcatcatcctcacgttgagtaagcagaggaggaagaagaggaagaggttggtcttggtgtctcaggggtggcagaggtggaggaggtggaagtggagtcaggagaggcaggcacattggtgtaacttttactgaaaaaaaatccatgtataagtgggcccacatagttcaaacccatgttgttccatgaccagtgatatatgtttgagggttgggggtggggggatgtatacttcaagggaagatttgaaggttttctcctagtattattgccattgaaatttaagagcagctagccagttaagaactaaaaaataattctgtattggattttttattcaaactcaatactatttgagcctgctcttactgaagaaactaagtgtttcagcttctgggaactattacatcgaatttcattaatagcataatatataaataaatataaatctcattgtccaaactggacagtgcattgtcctttcggttgattgacactggagaaaatattgagtacatttttccaccaaatatacctgcatgtggatactcttgcccccttccttatctcaaaacttaaaataaccatatttaccaccttcagcattgacaacattttctccatcaccaccgttttatttctattcctctatatgtgtttctattcctaatagaacacacaagccatcaaagtgaaagtctttatatgaaatacacatagatataattacctcagttcgaaatgatggcaggatacataaatcaaattgggccaatgagaaatgtagagatttcccagggtacatgaaatagtgtttgtgactcactgagtggttctactcaaacgtgagtatagcctaggagcctagaatcagggggccatgaaatatactaacagccctcttacttagcccatgcaatgagaaggtgcatttttggtcagtttatcacaaaagtcaattcgagcaagtaatcattttttaaaattaattcatatataccttaaacactgtaacttaaggcatataaatgttgttctattgttgactaatcttttaatgttagggacaagccttttcattaattgtggatctgttgcgtggcttttatgttttggggttttttttttttttccccctgtactttactctgaatgcctcagatagccagtttggtttctttaaggtggatctgagactaaggacactcattgggcagagtgcaatggaatgcaaaatcctacagttctgtgacttttttccctaatcttttagttatcttgtctacatggaatttgagaaaaatatttttggcaacttgcctttaaagaaatcttcccaaaatattcagctagagaaacaacaatgccctttctttccacaagatcgtgtcattggtttacgcaatttttatgacaactgacaataaataggtttgaaaacaaaagtaacccatggtagacatgtaaggtgagagtaaaagagtacaaaatattggaaagtggcttgctggctgggagagtccagcactccctgggcaatctgtgtattttgtttgtcttataaacacctgatgagtcttggtctgacaagtgaaatgtaagttaagtgagtttctagtacagaacttgcttatgagtatcctatgagattcatgagtctttttttttttaattcctaggctcttattacacttaagatctgaccatttggaataattcacttaacccaacatttaatctaggcaaaagggtaaactttgaacttagtgtcttttataccaaggaccatgttccatgtggaggaagctttcctgactttcagcaagccattttcccttctgtattcttctacttctcaaagagggtctctgatagtttttttttcatattcaagtgggtgctttaagagtcaataaaatattatctgaaacctgagtttctcagggttgaattttaaataaatacaaaatactttccagtgcatatgactctgaaaatatgattgtgcttttttcagtaaaagataacagcattgttaagagacaccttggtagctcaccttgtcttttcttcagcttctctctctgctttgagagtaaatacgtttgtgttgccactcttacctatttaggagatttgtgctcagttctatatacctttctcctctaccggtaagtcccaaatcaaagctttcaactcttctcacctgcttctcccacagtcattttcatctcaacaaatgtgctctcagttgcagagaccattctcagttgcagagaccatgaacaccttcctcttgtgtcctatgttagtctgttcacaaatactgtttgctctaccctcagcaggtatccagaatccagctgctcctcaccaacgtcatcacgacacagtggcccaggccaatggtccaggccaatatcatttcttccctattgtgccccaagaggtatctaactggtctcttttccttagccttgcccattttggtctagtctaaaaacagcagctggagggatgtttttaaaatgtaattcagatcacatcactccactgctcagaaccctccaaggccctgctagatatcatccccacctcccttcccctttctaccttaatctctctctttcctcctacgcattttcttccagcctctgggacttggcatttgctgttccttctgtctgtatcgtgctctttcccagttacacacagagctttctcccccacagccctcacgtgtctgctggaaaattgtcttagcaggagctccccatttcaccagccttcggcacttcctcactccttttcctgctctgtgtttcttcttagcacgacttacttaccataatatccatttattcatttattttcttcctctgtctgcaggacggcactgttctgttcactgctgtatctgcaacatctagaactgtcagtgcccgacacttagtgagtgctcaataaaaacctattctattgaggtatttatgttgactaaatgaattccaacccaagtgataaaggtgtataaaccttaatgttgtgcaactcaagtttgtacagttcagttgttagaacagacaggaagatgatcctttgacaacaagactgagaaaatgtgattcaatgatagtctaaaggaaagacagaactctgggatcccgtgtgttatttttagagccacatttcaggatgtaatagcgctgctgctaagaatccatgacgagactggaggttttgaccctggtgtcctggcctctttccagtttggatcattatgtcctgcttacctaaatccttcctgtcgttacagttagagaatttagctttcatttcctctcctaaacaactgcctgttaaaaagaattactaacaaattgctgtcatatttaccccaaacctagtacacctttcgctaataggcgagtcttatacatcataaagcttaaaacagttaagaataaatgcagcctactaaaaaaaaacaaaaacaaaaaatttacccagtgtgatggcagatgcctgtaatcccagctacaccagaggctgagtcaggagaactgcttgaacccaggaggtggaggttgcagtgagccgagattgcaccactgcactccagcctgggcgacaagagtgaaactccatctcaaaaaaagaataaatacagccaaatgaaggtattttcccatttttttctaaactgaaataaagctcttttttttttcctggaatcattctcatctttttgctcactgttttacaaggcactatagaaataattgaatatgagcattctaataagttaatttcattagaaaagcaactttagttcctctcatgttttcttttgttttttcctcgctcagaatacaactagcttggaaggattttggtgtctagcaaagttgaaggcagttcagatgtctttcattaataagttacagctggcactgcacagcaaactgaaatcacagtcactagacgtaagatggaaatgcaggcctcattcaacatctccataaataaatctgttattctataccaagttgaattttcctttgattacaaaaaataagctgttattatgacgttcaaaatgcaaatattgggattgagtttagaccagactgctcattatactttatgcaggtttgtaaatatttggcaaacttcataaattatgccttgtaatcaagtcatcaaataagcatgtaaataactactatagaaattaaattacaaaaatattatgtattcttttgtgtacaaaaagataaagtcaggttatttgttaccagtaataaaatattattttaacaaattgggctgaaagtcaaaattgctttgctaaacttgaattgtgttgagtgaaagacttactgcaatggttccagaagaaggaatttattctttgtttcactaaaaaaaaaattgattctctatttaaattgagtcctcctggctttgctaacatcctgcaaagcctccaagccctgcaaccagttcctctactgatatttaaccacagcattaccccaagggatcagaggcttcagcctcgtctggggacttcttagaaaggctattgcatttcttaaaattcagttttaattatactgtataggccagtggctctcaatacctgagaacttattagagatgcagattcccaggccctgccccaccctactgaatcagaaagctaggatttcagcggccttccaagtgattcttatgcacactcaagttagagaatcactgctaagcagaaaagctcaatcactaacatttatatcctgctttacttgcagaggccttaaagaacttacattaacttagtggtctgatgcccaggctcaactgagctgatgcctgctgaatactaaagcagctaaattgtaaatctgaactgcctattgatcacccaaaccccagtatactaattaataaaagcttcttcaccacattgcttcaacagtttttgaggctcaaatgtgggatgagtgtgtaggtctctgtgttaatttttgttttgttttgggtttctttaacgtttccaagactgaaagttgacattttcttgttaattgtttttcttgaagctcttctgagttcattggaaacaaatcaatgagggggggcattaagctgtccggagtgcagagctgtgaatcagaacaaataattgagtgcatattcttaagtttaaatgtcccatcccacctaagagttttctttttgccaaataaggataatgggttttattgttatttctattgctgggttgagtttacggaccaccagtctctgccttacatgggctgtggtcatcagagaatctgtggagctggtgaaatcagtctcctggggcctcccatgaccacctttttcctctgtggctccttcttccttgcctgccagttctcatttgctcttgcaagaccatctctcctagcagctgctacctcagtgtctcatccgtgatggcgctctctgaactctgaattatttatttgtgcatcaccaaaagtgatagttcctttagaccagattttgtgaactcagatgcctgtgggagccagggaaatgatgtgaatagctgaaaacatgtcaggcaaagacaaatacgggagggtgtggactttagcaagttggagtgcacatacgctgttgaggggggcactttcacttatttccagctagttttccaactaccaaaacatgggcctgaggtttctagattgttttcatgtccatttaatactaacgtggattttttacatgaaatctcttgatattaaaatgttggcaactcattttttaaacattgtgcaaaatgacaaacatgtctgtggatcatttagaaccatagctatagacatcaggcaccatgtagcattaacacacttgcactaaagtgaatgctaatattgacttattgtgttcaccttattggcattttaaatgaaagatacctgtttgttcctttatttcttcattcagctattcatccaggaatatttttttgatgaaacctgaacttggacaaatcatttcaattatattaatctttttaatcctcatttgttaaagaaaggaattgcaccatgtgtcctttgaagtcactttctcttataagacttaaggaaggactggctgggcatggtggctcacacctgtaatcccagcagtttgggaggctgaggcaggtggatcatgaggtcaagagatcgagaccatcctggctaacatggtgaaaccctgtctctactaaatacaaaaattagccaggcgtggtggcccatgcctgtagttccagctactcaggagactgaggcaggagaatcgcttgaacccaagaggtggaggttgtagtgagccaagatcacgccactgcactccagcgtggcaacagagtgagactccatctcaaaaacaaaacaaacaaacaaaaaaacttaaggaagcactctctttgcaaaataaagtgtaccaggagccaaggatggtccaggttagttgctttgacaggacacttgtgtacacatggaaatccctagataagcttaacctggactacatcatcatgacaccaggagtcagctactaggataggaggctttgtggttggagaggtgacagaagtcattctgggtacttcctgtggacattaaaggttgagagatcctgagatagaatgcaagaaaatcagttgttctcggcttcaatcagttacacaagaaggaaagatctgagaaacattcagtgtggaatccagaggttttgttcctgggtaaagttagagaagctaaaatagagaccagattctgattctgattaactgggagtacgatgatacagctaatcagaaattgagggtctggttactttggatcagggagaaaaaggaacaatgaatttgtttaaatttttttctctgaggaacctgttagttgcatgacctgctatgggtgatgcaataggacagagatcatatactacttaggatccttaggggcttgtccatggggcgagctctgttctgtctctgtggcacatctctaggcctctgaaatcctgaaaaggtctacgtttgtttgtttgtttgtttgtttttgaaactccctactttcataaggaattaagtgtggatttttagctggcatttttcttagtgctggacttacttaaaagctcctggtcaaaatgattcttcaggaacatgcagctgaagctagaggatatttgctgttgttttcggggaattttgtcacctgtatcagtgaagttatttctttggatgagagtatcaaagatgaaagaggcctcaagcctccgcttagctcccaggttctctgcagctgcactgaccatgttgacaaggtcatttaaacatttgcatggacagtgtgtttttatactgttgactggtatttcctgaatgctaaaggaatgttgctcatgatagaggatgtagttgcatgacattctatgcagaaagtacaggatagtaaaaaaaaaaaaagaaaagaaaagaaaaagaaactaaaaatcccctagagtgtatttccccttctgtgtcttttcttaattcaagtgaaatttatgtaacataaaattaaccattttaaagtgaacaattcagtgccatttagtacattcaccatgttgagcaagcaccacttctacctactttcaaaacattttcatcaccctcaaaggaaactgcatgcccaataagcgggttcctccccatcccctctccccacagcgctgataaccactctaatgagtctttttattccccacacactttcctttttatatgcagttggactcatgctgtttaatatactgcattttattatatgaattttcctgtttaaattaaaactttttcttaggtttcaatgtaaccgcaaatccccatgatctgtgaggtggattttcatgggcgctcagctcttgctgttttagaaatcatccagcctccttcacagttgtgtttgaaatgctgtgctcttcatggggcacatggttttcagtgctggagcctttctcaccactgcatttcatgaacttgacaggtttcataagaagagactgtagacccagcccagagaagctcattttgtcctagttgcaagtgttatcaaatgactccaccaagggaatgcaaaatgaattactctaattgcactagaagcataatgtgaagtttgtatttcaccttttggcccctgggagagaaaaatgtcactgactttaaattgcttttccattttccacatagccccagtttccagtgccagcaaaaaattgccattggaaacataatgtatgctgacatgggcctacatgtatttgtatgttttctcatctgtgtggcaaaattaaaaactggatggcatgaagaagtgggcagaatcccttgtattacatgagactttgttgcctccaagctctatgatctggagccagtaatttaatgatcataatctggggtcggcaggtgcaggccatgggctgaacacaacccttagcctaattttgtatgtcctgtgaactaagaatggcttttacatttttgaagcgatgtttaaaaaataaatttaaaaaaaaaacaggaaaactagacaacatggaactatgtgtgcccctgaagcctaaaatatttattatctggctcttaatggaaaagatttgctggtctctaataataatactaataatagtagcagcagcagcaggaaaatagtttatattgtatgtcagacactgttcaaagtgcttgatatgtattatctcatttaactctcacaagtctgtgggataggtattatgattatcctcattttacaaataaagatgcccagagaggttgagtaacttgacttttcaaggccatacgtccagtaagtggtgttttgagcccaggcagtggctctctctagtgctctagatcctgaattctaccaccaccctgtgctgcaattcacagttggcttctttttctttttctctttttttttctgaggcagagtctcactctgtcccccaaggctgtaatacagtggtgtgttctcagctcaccacaacctctgcctcccgggttcaagttattcttgtgccttggcctcccaagtacctgggattacaggtgcatgccaccacgcccagctaattattgtatttttagtagagaccgggtttcaccatgttgaccaggctggtctcaaactcctggcctcaagtgatccacccacctcggcctcccaaagtgttgggttacaggcgtgagccaccgtgcacagccagttggctgatttagcttatctgtataaaaactggggcagggagtggggggaacagcctctttcacctgtaacactgtgtgatgttaatgtactttttaggcaaatgttttaagatcattatctgtgggagctatagtcatacagtagtacttcccgaattagtggcctgaaaaaaggattccttaaaaaagtccacatataaagggggttctttggtcagctaagcatgagaaagcctttagacaggtttctttatggtagtgctttcagaagaagtatttcttttttttttttttggaggagctgggtctcagatatatttgagtcttagtgctttactctttttttttaagttttagggtacatatgcacaacgtgcaggttagttacatatgtatacatgtgccatgttggtgtgctgcacccatcaacagaagaagtattattcttatgtggatctcagcaaggaagaaagctattcagctgtttcctaaactttttttttaattttttgatgagacaccattaacatctttcagaaccagtgtggcactgaataaaagtcagtaaattatatcatagaggcattattcagctcaatatttttctagaagtatcaaaacaatgatgtaatctaaggattcatttattcatatttaccataaatattctatttattttccctgtttttccacttccacttgtcttcactcctcactgttttctgctgtgtgtggggagactttaccttaaaagacagagaaccaggtaatgaaactcaagcccaccgatttagattccttttagtagctcttatattgaaagtcctatttagtttatagaattacctatagatttgatttgcttgaactaaattggtggatgctgcctagttaagagttagacaaaggcttcttgattgattatattgatctcagactaagcaggtatgattgtcatcaagttgaaatactatttactttggcatgacttaatttgccaacattgtcaacaggtacctgtcaggaagaatgtgaccgataaatacaggccatcaactaaagaaacaactctatgaacaccttttaattcaccagctgtttactcatcccataccaacagaatttcacaaatttgactgagttgagtccaaaagtaatgctgtcaaaaaactgatggttgctgactggcttaagatgatgcttttggttttctcaacattttaaaatccctccattcttctagagctttccatttggatgccaaataatgttacataaaataaaccaaaaatcttattttatttttgaaagatttctggggatgtaggaatgtagttggtctgtggactttcaggcactaaagaacatcatgtgttgtatatctaaatcagaagcacaagtgaatataggcattaatgtaagtatactctatgtatacatttttccctcctgatcttttgtgtccataacagtatatttattgtagtagatatttggaaatagatgcagttatttgtgacaagattctatagatccaataggacattgctacagggtatctattaatatatagaatcaggcttaggcaatgcaaaaattgtgtctaaggaatgctaacaaagccatttggtatggaagtttgggactgcagcttctgaacagcacaggtgtcctcttttttcttgtgactatttagaggctctttttgacctaactggccagtgttgtcaagataaccagcaaggctgatagactgttttgactctctgggagtgactaaattaattttgtctaggaatgtataaatattatcctcacccattcaattatctctttcaaacatagccacccatactcatagatggcagcttatttcttgcacaaatactcattcaccatgctctgagggtaatttaagaatcatatgatttaattttgtctaggaatgtataaatattatcctcacccattcagttctatctttcaaatacagcctcccatgctaatagatggcagcttcttttttgctcacatactcattcagcatgctctgagggtgatttaaaaatcatatgacacttaatatatttcttctttcactttcatcaattttactctgtagcttcagactgtcaagaaaaagaggccccagttgctctctttttccccctttcaattcttctcttttagaatttgaaaactttatgaggattattattgacttcccaagggcttttgaaattaatgttgggttgtctttttaatttttgtgggggcaaaagtcctgttgctttttagccaccagtttcagaagtaggttgctgtcagtcattatcacaggctcactgatgtagctttctatcctgggtttatcaactggacttgtgtaggatggcagcttagctcctttattatgcaggaaagtcttcactgtcttttttcttgcactcatctttcttgcagcaacagttcatggtgaattgccctcttgtcccatgggcatgtgggcgtttccaacactgacattgatatcttgtgacactaacacttagtacctgcacttgtctgtccttggtggagccaggagaaatcagctgacatgaaagagagaacttgtttaatttttacttcttaacatgatttagaagttggtctgttatacaaacaaacattagtggttttgttcctttttaattttaggctggatttagtgtcctagatgaatacctttgaaagataaaatgttcatttgtcaagtcctgcctgtaccatcagcttctccactctccacctctgccactggggttttataattcccaggcctcagacctggaccaaatgctgtgggaatggggactcaggctttgggaacgctggcccttagcctctggctcctcctgctgctctgctggctctggccttggtccttaggtctggactggacagttggtggcccaagtcatgttctgatataccccaattttaagaagtagacctctgtctggtttctgtactggcccaagtcatgttctgatcatgtaccccaattctaaaaagtagacctgtgtctggtttctgtactgaatcatctggtaagagttatcccaagaagcccagatcttccagaccagaactatctcaagcaggaggagctgtaacttccaacagtcttcctctgggccagctccctgctgcctgatgagatcctggaaatcaccagctcctgaatttcctgtggctgtgaaatatcctcttacccaacctccctgcagctgcctgcattgcttttatgttgcctgtaactttctttcaaatacttcaacacatgcagtggggtgtgtgtgaattttcatccaaaaccagggaatgagaatttaaaattttaaatgctcaccctaaaggtagttagttagcgtttgaaaaatttgaatcaaagcttaaagatcaatcattatatataaattatagctcaataaaattaattcaaaataaaataaaacaagcctaccctccagtggccacctacacacccccttcagttaattttctctctcattagcaccaggtgctctgatactagcctcctggagtggtttctacatgatagacacctggaggcttgttaaaatgcagattactgggccctgcccccaagttgctgattctgtagatttgggatagggcctgagaatgggcacttccggtaaattcctatgagatgctcaacccgctgatcaagggaaccacacttgagaacctctggcataatgcagactggaactaccttttctttggtggagttcttcatggtattcaagatatgcaatttgtgtagaaataaggtacaagccctggtatccttgtgagcctagggcacaggaatctggcaagcccaaatgcctgcctggtatctgttggaagcttgttagaaatgcagaatctcagtgcagatgccaggcttactaaatccaactctgtggttcacaaatgcccccaggtgatccaaatgcacattaaagtttgagaaacacctgcccaaaccaaatttagttcacatcatctagttcaattgtcctcaactataggttcacgttagagttacctgcagtgtttaaaaaagcagattgaaagacagcccaagtacattctaattattagttagaatctctagggtgagacccaggcttctgaaatgtcttataattcccccaggtgattctaatgtaccacaggtgctgggaactaccagtctagtctctctaagtgctatccgcatagttcttttaacagtgtactagctggaaatgtcttccctttagcctgccctcaaagttaaatactgacaatttaatgccaactaaaccttctcctaattcaaatgaaatgatttcatttgccatgctttttaaaatttttttattttttatattttgtattattattattattatacttcacgttttagggtacatgtgcacaatgtgcaggttagttacatatgtatacatgtaccatgctggtgtgctgcacccattaactcgtcatttagcattaggtatatctcctaatgctgtccctcccccatcccctgaccccacaacagtccccagagtgtgatgtcccccttcctgtgtccatgtgttctcattgttcaattcccatctatgagtgagaacattcggtgtttggttttttttgtccttgtgatagtttactgagaatgatgatttccaatttcatccatgtccctacaaaggacatgaactcatcattttttatggctgcatagtattccatggtgtatatgtgccacattttcttaatccagtctatcattgttggacatttgggttggttccaagtctttgctattgtgaatagtgccgcaataaacatatgtgtgcatgtgtctttatagcagcatgatttatagtcctttgggtatatacccagtaatgggatggctgggtcaaatggtatttctagttctagatccctgaggaatcaccacactgacttccacaatggttgaactagtccacagtcccaccaacagtgcaaaagtgttcccacccctccacatcctctccagcacctgttgtttcctgactgtttaatgattgccattctaactggtgtgagatggtatctcattgtggttttgatttgcatttctctgatggccagtgatgatgaacattttttcatgtgtcttttggctgcataaatgtcttcttttgagaagtgtttgttcatatcctttgcccactttttgatggggttgtttttttcttgtaaatttgtttgagttcattgtagattctggatattagccctttgtcagatgagtaggttgcgaaaattttctcccattttgtaggttgcctgttcactctgatggtagtttcttttgctgtgcagaagctctttagtttaattagatcccatttgtcaattttgccatgtttttatagactcataagaggaaacatgttggtggtgatttatctacagtccctatttattttagaatctgaggcactggctatatttcatggcaagctaaaactcaaatgccttcatgaaactaaatttctagcttaagatgaaggtgtagttcctgcactgaatagccttcatctgtagatttgtgaaatgttgcagttttacatctaagcaccttataaggaattctatcttagacaagattagatcctgtggcaatctttatttgaaaagcttcatagtttgctccaagtgcatggaaatgtgtcttatttctcttgaatgccctttaggtcttaacagaattcacagtgccaaggagtcaaaaactatatttcaaattatatacattcctgacatattatttgagcagattaaaactgatggatagagcaatttaggcaccttgaaagtagctacttgaaaaatgccaactttttcttatctccattcacttaaacaaaaatgggccaggtgcagtggctcatgcctgtaatcccagcactttaggaggccgaagcagatacatagcttgagcccaggagtttgagaccaacctgggcaacatggccagaccccatctctgcaaaaaataccaaaattggctgggtgtggtggctcacacttgtggtctcagcttctgggaggctgaggtgggaaaatcatctggacccagggaggtcaaggcagcagtgagccttgattgtggccactgcactccagcctgggcaacagaacaaaaccctgtctcaaaacaaatagaaaagtaaaacaagaaaacaacaaaattaattgatctagatttgtgagttgtcgataccaagaagttcccatgttttaaatatttcagatggccccgtcattgattattctcacagctcagatatagggaagatgaaagctgctgcctatagcatcttgcatcctcttgcttccacatacaagaaatgtgaacttcaatcccctaaaaaggtcagagtttccattctagtgaacacatttgttcagcccaggtggggtgggacatgacaaaaaccaagagtgggtctagaaccatggggctcttcccagggctatcactatgagatagaatatcctgtgtgtagtcactctcagaaacagcagctcccttaggaaactgctgtgtcctgaatgcttgtgtcccaccaaaattaataaactgaaatcctaccctctaaggtgatggcattagaggatggggcctttgggaggtgattaggtcatgagtgtggagccctcaggaagaggattagtgtccttattttaaaaaggtaccagatagcccccttgccctttccactgcatgaggacatagctagaaggcactacctatgaactagaaagctgccactgaatctgttggcgccttgatcttggattctccagcccccagaactgtgagaaataaatttctgttgcttataagctacccatatattgtattttgttgtgtgtcaaacaaagacaaaaaccaaactcacatcttatatgggcagtggaaggagaactccaagttgaggggggctgctcttttagacctatgattctcaaattctaatgtgcacaccagtcatctggggatcatgctaaaatgcagattctgattccatggttctgggatgagacctgggactctgcattcctaacaagctcccagatgatgttgatgctgttggtcttggggccctttgagtagtaagggtttgcaacagtgcttcttaaatgtgtgtgtgcaaaagaatcacagggaaggctgattaaaacgtggattcctatttcccatcctgaagattgattcagccggaggcctgataatttgcattttaacaagttcccaggtgatcctgatgctgctggtccccagactacattttaataacaagcctctagttaacttttgaacaacttaattaagataccttcactagtagcctcttctgtgaaaacagagagccaaacatcaaaagatgaaggaggatgctactgagtccctttggagaaaattacatcacaaacttggagagtgccacagggtctctgttcatttttccattgacaatatgcttctttgactaaagacgaaaaataattcttcaggatcaaaacctagagataagattggaaccctaagattggaagtagtgctgcctgatgaataataggactagttattttaggatgacgggccagcctgtgcctagtgaaagcttagaaatgccaatagcagactgagcacggtggctcacgcctgtagttccagcactttgggaggccaaggcggacagatcatctgaggtcaggagttcaacacaccctggccgacatggtcaaaccccctctctactaagagtacaaaaaaaaaattagccgagagtggtggtgggcacccacaatcccatctactcatgaggctgaggaaggagaatcgcttgaacctgggaggtagaggttgcagtgaaccgagatcccaccactgcactccaacctgggcgacagagcaagactccatctcaaaaaaacaacaaaaaaaggaaataccgaaagcaaaatgttattggtggccaattcttaatatacgtcatgagatttggggtgatgtttacttcttactgtgtatttctttgctttacactttcctatgaagcatatttaaatattgttttcataaactgggggaaaaaccctaaccaatatttttaaaagaaaaaagtaaaatatatgctcagtgtaagttcatagtatttttggtttgtgtttgttgtatctgtgtctctctacgtttgtattttcatgggaaagggattatttttgtctatgtcagtcctaatgttcccggggcaaaggtgatagatgggtaagagcaaggtctaaacatatgcctggaagttggacagggcctggggtggtgaaaataaatttaaggagtcccagaggagaggtcaaaagctccaggagagaattagaggcagcttctctttctctccttgccctccaaacaattcagcacaagccctcaagtcccttgaagagtctttctttcccccttcttcttagaagggctgaaacacactttaagttaacttaggaatggttagaaaaggttaaaaaaatgggagaacagtagcaattaacaagctgctagggaaacagggaaaccgtgctgatccgaacatcagagccgacctcctgtggtctggttccctagcacccaggctcaggcttcggcttggggtggccggaccagaaggaaagtgccccgtgtggcagaagtcatctcaggagcgtgtcgccatccagccaatgacttgtgttccaaggactggaaaatgcgcttcctggacactatgtagatgattaccacacgagcttattttcagcaattcaagaaagaatccaattcgtggtttattgcttctgttagtctggaaatggtcaaacaagttgataggcatctagttcacgcctggcgtaactttccaacaaaactccagggctctactgacacctgctggcatttcatctactttatgttaaaaaaaccccaacaagacaaagaatcattaatatttttcctgcagtcctttgcccttgttatgttacttgtactttacctgaacgataatagaaggggcctttaccatgtcgtgaggagagaagtgtgggcaagccattgggtgaaaataaaaatccccaacacgaagaatgtaccacagagctcttgttgcctgtctgccctgcaccagctgctctgtgaccttaggcaaggccattgacctcactttcatcattgcaagaagaaagaggcagcaaccttccctcccagttccctttagggcttctgaggatgctggtggcatttcctactaactaaagcatgggccctgtcactggagtgatggccttaaaggtcactctcactgacctttccatcacaataaacaagattccttgccagcgttgtatgttcaaaagatgaatgaaagttatttaagcctcttcaaagtgcaccatctctgtaatttatttcgacaaacaactaaattagaatgatcagaaaaagcccagtgaacagtctcagaaattgtccactttttttttttttgtctaggaaactatggactttgttttgtgttttagaacatgtagtaagcctgcaggttgagaaaatgcatcccagttaatgccaacccaattatttgtgctttttctgtctattcttgggaaactctgtgtgggcctgtggtttgttaggtcaataacaggatatttgatagtctgcagggagttatagtccatatttagcctgacagaggaagtgagttctgctgatgaaaaataattgaggcatttctttaattctactatttcatttcttcatcttccttcagaatcctgaccccactatgatgcttgctgaggctttcgatgctatttacagctctgcttttgctagtcacaaaagaaaatttacctcttataacccctaagtcttccctcagaaaactgttaggtgtgaccaggatcagcaaaaactgttagattcacatccattagtttggctactacttaaaaaaagaaacaaacaaacaaaaaaacccagaaaatatcaagtgttgttgaggatgtagacaaattagaaccctgagcaaaagggttcccttgttgcatttgcagtcctttgttggtgggggaaaaatggtatggccacgatgaaaaacagtatggtatttcctttaaaaattaaaaaatagaattactatatgatccagaagttccacatctggttatttatccataaataagaattgaaagcagtaacttatttgtgtatcaatattcatagcagacatgcaattcacaatggacagggagtccatcagaggtgaatggatgagtgtattattcagcctttaaaagggaagaaattccgacacatggtagagcatggatgaactttgaggactttatgctaagtgaagaaagccagtcacaaaatgacaaattctgtatggttccatttatatgaggcacctagcatagtcagaatcacagagacagaaaggagaatggtattaatatttatcaatggctgggaggagggggagatggggagttatttaatggatatggagtttcagttttgcaagatgaaaagagttctggagatggctggttatgttggttgcataacaacatgaatgtacttactgccactgaatttttcatttaaaaatggtgaaggtgataaatgttatgttatgtccatttttaacacaattaaaattaaaagaaaggttaaacagcaaaaaacaaaacaaaaccatactctgttagaacgcagtcatcacctttgcccttacagagattaaattgcttgactttttaaaacctggttctactgggcagtgctgtccaacagtcccatctgtgatgatggaaattatctgcactgtctgagccatcaaccccatgttgatgtttaagcatgtaaaatgtgattagtgcaaatgagacactgaactttatatttattaaatttaaatagccatatgtgtctagtggataccatactagacagtgcatatagagtatacgtctatattactatctattccaagatatttttccttcctcagcactaagccgcaaatctaagcagtcaggctgtaaacctaagaaggtaaggaatcagcttatgtgtgggccaccgttctatttaacccaaatgtcaatttgctacgaagtgttttgccgagggtatgattcttctatggcattcattggcatcagtttttggacccaagggcagagttggccttaattcatgggctgagcttttctagtaaatgcccttttagagacccaaattcctctactgccatgcacaatttcccttcacttgtccttgtaaaacagtggagtgatggtatgaactacaagtgaggtccaagtccttatacagaaattatgtgagcacatcgctgtttgctctgatcaccctggcaatgaaagaatgtttttctttttaaggctttgctggaaaacataggtaagataagtaacaaactcttagattgaaaggatcacacaataaaattgatgaacccctattcatttatcctctaaagtgaaaatagttaaatatgtcatgtattttataatgctggttggaaataattaagattgccagcaactgaaaaagggcttatatttaaacaagctgcaaatagaaagcttcacaagtcagtcagtgggcaacattcctttgtggcagcccagagtttaatggcacaatagatggcacatttgtcttcatggaaagaatgaaagctgtttattaaagaataaaatatgagcctgcaaaatatagatggctgtgtgacaggaaagggacaaaagaagagtttgtgtttttattacacaaaatggatacaatctatctaataaaaactgctctatttgactccagcagatttgctcaccaagaatattttttctttctctttcagcaatgggtagaaggcctgagatcaatcatacacaacttcagggccaacaacgtcagtccaatgacatgcctcaagaaacagtgagtgttgtttgcattactcgtttttcttggcagttatcaaacaaatggtcagatgaagagatgaaggctaggtggttccttcctccaaattcctgcttgcctttccctccatgctcctgaccttggagttgaccaacacacacctgtactcttcataccacgtagaaaggcatgcatgataaacccatagcccaaaacctatatgaaaagaatagttgatggtcaaaggacactggaacctcagtcactctgtatgctgtcagttgtgggtactggcttttgtgtccccagattgagttttctgatagacagctctgcatgtctggagccatcgctgagtgctggggtaattctatcctctgctgcataaaactgagaaatgaggagtgtgaccaagagacgcacttgccaatgcacctgaaaaagaagcctcagccccaagtgcagtgctccttgtttagcacaccgtcagggatccaaagttacctctgaatttttttctgtaggattcagttatttaaagatttgatcaaggatccaatggtgatttccaaatttattttttccatgaaagaaggaattactccagcttacagtatctgaaatccagaggagtactacagtggtagatttaaaccctacccaagttaacctttcaaggtgacatgaaaatcacccacaaaggaatcctagccaaagtcaaatgtcagccagtttgaaaagcagtgatccgtgaaggtgggggccatctgccttcacagggccattggcaggcagttgtgaggtgccaaggggaaccatgttgagaaattgcagggataagcctgtatctctcaaaattatgccccagcaccaagagtgtgattcatcatactcacttggcaatgggccaagaggttagtcctaaaggtactgtcatgtcttatcttctggtcattgtggcaggtgcttacaggtgtggtctctaggctataaatcccggcttcaccatggcaaattcttacacttgtgcctcactgtcctcatctgtgaatcaaaattaccatgcagatgaaattggaaagtattctttattcaatactacttatcttgttatggtatccctccaattttctttcacccttttagtggaggaaagttatttagtcttatctatttctatgtgttgtgcagctgcttcttcttttcctctgcagttgccctggcatgtgtttttaaagagaaacccagtggatattctgatgttatgacttcaggcactgatagtcctaaagggtcaaaaacttttagaaggcttgcttatacctgagtgacacaaatatctctatctgacatgagatctaacaacatcctgcccagatccctttatgaagctggtgttcacccagccatcatctgccatgagaatgggctcaccaagggctcagacctgtccacttcttcagagcattgccctctgctgaaggggagcttccattcctggaagattatactcttccctcctccaggaggaagtccacagccaatgatgagctgcaacagggtacagaaggccatccctcttgccgccaagtctggcacaaatcacatgagttcaagctaaatcaagctccatctgaaaccacaactttgtttaactcttttttctgctcagtcttctctcactctcttcatccctaaaacatcccgttattaaagtagttagtggtgcttctacgaaacttaagacagaaactttactaaatcatcatgttctgcaaattgttagcacattattgattggaaacaggaagaatgggagtcattagctaagaaaagtcctagctccaaagtacagataaatgttctgagtctcctaaaagcctggggaaagcaaggaatttttcaccatcaatttgagttgatgaactagtcttaccactggaaattaaggaggcgcccatgtgatcagtacttggcagcactaggagctgggagtgatgagtcctcatgaattctcaagacaaggctggctgctgtcaccgtgcagttgcatttcccaccaccttaatatattattacagagcaataatcgagcagaccaatcacaaataagtaccaacaatgtgttttgctcaatggaggcacccagtcatctcatttagctagggttgccagataaaatagaggacacttagttaaatatgaattttagataagaaacaaaaatattttagtataagtatatcctatggaatgtttggagcatacttacagtaaaagaaaattacctgttgtttttctgaaattcaagtttaactgagagctctatatatttatgtgctaaatctgacaaccctaaattcatcttatagcacataattgtctgattttcagaaccaatgttcttgatttaaatgaactttcttttaaagttcttaacagaattgaagctgctccctctaagaaacattaaggcaatgttattgctattgttttgcagctggatgaaattggcatttatgaccaacacaaatggtaaaattccagttaggaggtaagtaatcattcctatctgctgtccgtgtcccgggtcaacgcttgtcatcccaaaccaaagagagaacccttcacaagtatttgtgtgttaaatgctttaaagatatttctggaatcttagtttcaattgctttgacaaatgctatattcagtttgtaaaaatcatttatggaagtaaaactgcatttttttggtcaaaataggtggcaaaagaggtactttgacaatttaaagaacatcagaaaatgtagaactattttttaaaatcggcaaataagtggtttttaggatttatgtttcttttgcttatttgccatgagaaactgttagctaaacttaaagaagattttattgtgcacctactgtggaagggtgtggaccgtgtcttgagaagtgtgatgcctctgaacagagcattttcattctgggctttgctgctcctctggtgctcagggcagatggggatacttctctggcttcgtgctgcctactctctacatgtactgtaactgacaccacacactctgtggagctatcctttccacctttgccctgatgcaggtaacaatgacaaagaataaaaaggcttgaggcagggcatggtggctcatacctgtaatcccagcactttgggaggccgcagcgggtggatcacaggtcaggagatcaacaccatccctgctaacacagtgaaactccgtctctactaaaaatacaaaaagaaaaaaaaaattagccgggtgtggtggcaggcacctgtagtcccagctactgggaggctgaggcaggagaatggcatggaacctggaggcagagcttgcagtgagtcgagatggcaccactgcactccagcctgggtgacagagtgagactccatctcaaaaaaaaaaaaaaaaaaaaaagacttgagtggaatcaagaataaagaaaacatggacaggatacatcctccacatgtgttctttaatacttaagtggacagatttcaccctctgaggattccccatgcatccctcttttctgcttctcacttccttccaggggttagggtttacacatggtctctgggtacagttggaaactctttccacagtagtgatgggaattctttaccaaactcttcagtacctttttggttggtgtttgttttaagcattcatggaaattccagaagctgggctgggccccagggcatctgcttttcacatgaagacaggcatgtatctggattcgtgaacctaagcccacaaccagaatcaaacatgggttccccagatgccaactctctcttccagggttctccagactcaggttcatgttcacttctctggacaccactttagcaaatacgcaaatcaacaaataataacaaacaaaacccagaactactgggtggaatcctgtcttagaattgatctgtctttcagaaataaccaggtcaccgagtgcgtagcatctgtgtggatgcattgagcagtggcatgtgctgtggctcctggcatttctgactctcctttgcctccttccctgcccagctgcttcattctgctctgcagcttccattctgcatccctgtgagactatctccatactcccttgacattactcttttcatatttaacagaattgtcccagaagacctcatttttctcaatcttgtatattaaacaatcacgacctaaagtatccatgtgaccacttaaatatcgagaaaatgtaaagcacagaagtcatgaagaccttagacaattttttttaaatttaactctttattgagggcttgttgagtcatggacctcatgcatttgttgtggtctttccaaatctatctgtaggattctctgcttttatttaataacttgctagcaagtcaacttttagtctgctttagaagattgaaaaaagccctgttagcagccttgactgatggttgttggcagatactttatgcttatccttatttaaaatcctttgctcagttgagtaatagcagaacaattattttaatgtatcccagtaccctacagctattgcatttttatttaaaatcagagagcacaaagcagtgtgaagaatagaaatgtaggttggatgtgtttttacatgccttactatcctgctttttcttccaagatgaggttcaggaaatgggcaaagtagagacacatagattgtgatcaaagcacttctaaccagcagtcttggtttcatttgtatgtatcctatgaatcaagtcattgtcatacaagctttgaagtcgtttctgattccagtgatttttatctaacatgttcacatacaaaattattaccacctttttgtagaaatagcttagatattttggcatcttctttagctctctttgacatggactccatggtgcttgccagtattaacaggtgtttgacacaagacggctgtgatttgggggcagtttgttagagttgatggagaattgataccatgccagaaaaaaaatcagataactctattggtgaatgagctgccaagagttagttggaaattgttgtgtatgttttaatggatatgaagagtaaacacttttaaaatgttattcactatcattctgaagtttctaaaatggaaactattagtgtactgtccataatattaaaagagatctggcttcatagtgattacatagcttgggaatggttcctgctctttagcattaaaccaaaatttaatatccaggaagttgcaggaataacacatgaagaaagtcttaccttttgtctccctcttctcttgtcttgctgtttacataacccatgcagtctgcctttctctcaaattcacaaatttacactcagtttatcctcccactcagaccaaagttttggaaatagcaattctcttttgccaccttccctcctctctcgtaacctggagtgaacaccaatgactagaaaattgggaagtgagtagccagacagtagttgtgggcaggggctggaagagatcccaaacaaaacggctgtgttaaagaaggctgagagccgcaggtgccgtcttggaagcatccctatataatcagcccaaccatgtcctgaaggcccagcagcccacgaagaaggtatgattctgctggggcagttgccccatccttcactcaagagttctctgtaactttcagaacacggtgttaaaaccatcgtgtagattgcagaccctgtttcagctagcaaagagtgggactcccttagtttctaggatcgttgctgttttagccacttgcgaagtcccccggaatagaatttaaccaggactctaataggactggacacaactcaggggtgtttgcttttgtagcatttcttttggggaatgggggtggtttagtttgattcaacaaaaactcattgagtaccagttagctatgaggcactaagcttatgtgaacatggggctatatagagatttgagtaaatcacattccctttgtaaatgctctatgttcccatgaaacacagccacgatattatctcccttcttggccccctccatctcccttccccttgagacattcttctactttctatttgttggcacctggccaaaccctagccaaaagattcaatttctgtgtaggaaacagaagctattggtacccaggttctgtttcaccagaaaggctcagtctccacacccgctgatttcatgcccacgttgatcagttttcatctcgttatgccaggcatgtccaaacctaacagaggcttcagttagctgggatacccctgagattgctatgcaaagattgttctcctgagagcaaatgccagatcctgccagagtcttactagctaggttaacacaaactttttatgaaataatagtcaccctgaacagctactttcccctaaattaaaaaggctacaaaatttttgtcttaccccaaatttaatgtataaaaattacctgaactctagagatgaaaaatgtaaacatagcaccctctatactaggaatcttaaccatttattgatgtcacacacatattctctcccatatttgtagatttgttaaagagaattcacaggcctccttatatttgaatacaactgtctcaagaactcttaaaaatgtacttcttgaagtattcttggacctggcatgaaacaataaagctgtgaatgaacacataattcatttacctacagctacttcttagtctattttgggaagtcctactctgccactgaagtggtgctttctcccactcaggaagaggaactgtcagcactctcattcagaacttgccttctacttagcacggatggcggaaagtacaaaaacgctgggcatgagatgctgttaaaaatccttctgtgctcacaggggaggcattccaaagccagccctcatggatagaagtaaaactccatcctcaagtcaagctggacttctgaatgtcgagttaaaatgaaattatcatggtaacacattacctgggcttccaatcagggagcgattgaaggctccttggtggctaaggtatggctcagagccaagtgtggtgttccagggtaccaagtcctctgctcaatagctttcattctgagtggcaccaacacatttataatggagagtctctcctaacttttatcatcaccaggaagtgtgttcatcaaggtgttatctattctactagccttgatgctcactgttctagttaaaaggctatccaaaaatactatgtcttggggtactactgagatttgttgaaacattggataattgttccccttccccctcacccaacccatcatgttgacagtaaagtcccttatccttgaggcagctgacatttcagaggggctcaagggtgcttagcttgaaaacaagaacaaaatatgtctgatcacgcccgtgtcaactgtggttaagtgtgggaaccaggataaggacaactgaaggcatggattgagttgtaaggggccgcctccttttccctaggcccagttattgtcaacatgagggtttgttctagagctactgtcttatctgccacattcctttttcataagaaggcaatttggtagcatcagaatttatcattgtttttgtccaaaaatgtgtgtcccaggccaggcgctgtggctcatgcctgtaatcctagcactttgggaggccgaggtgggtggatcacctgaggtcaggagtttgagaccagcctcaccaatatgatgaaaccccgtctctactaaaaatacaaaaaattagccaggtgtggtggcgtgcacctgtagtcccagctacttgggaggctgaggcgggagaattgcttgaacctgggatgcagaggttgcagtgagctgagatagcgccactgcactccagcctaggtgacagagtgagactctgtctcaaaaaataaaaaataaaaaataaatgtgtgtccctccagtgccgcttgccccttgttctcccaagcaccagggggacccctggtcttagattcaagttgcatcactagactaaccagctctgggaaccagagggacactggaggaactagtttgggaaatgaaaaacatctgcaatgagaggtaattttattctcctcttccttttaccctagtctcactctccatagtaggacctggatctttgcatcagagaaaacataatgaacaataactggaatgtgtgtttctttcttttctgccctagtattactagaacatttgcatcgggaaaaacagaaaaggtgatctttcaagcactcaaggagttaggtcttcccagtggaaaggtatgcattaacttaataatgtatttctaaaaccattttgtttatttatcttctcatatgtaatgagctagattatttatattaaactgatctaaattagatttggaattatatgtcagtgacatatagtacagttaattttcttttctttcttcttcctccctctcccttcctctctccctccctcctttccttcctcccttccttccttttgttgcctgggcattttaacctaaatctctaaaaatgtaaatagtttgcttcaaatgatttttgtcacctttcttaagaaaaggaaatgaaggccagcttgctgtgttacacagtttttattttagagaagctcaccaacactgcctcaaccaggcacaacattagcatgaataattaactaataaattcaattctacaagatggctatgcaatattttgtgaagcatctctccccgcaccatttgtattcatggcccttcaaatttaaaataattgaaattaatttattgacttgaagaaagattgaagcctggtactattttaataagtcctatttgaaatataaatttcagtttgaaaagtaaaatcttacatggttaccctaagcccgttcacatggtcttgcaaaaattcacaaaataagcataattaaaccttgggcttgatttattcagcatccctcaggcaggcacttttctccctcaaggtgagttggaggaaatatttatattcgttctttggggtatttcccagagcaaggccagctgtagccaggtgttcgcacacacagaatctggcagcatgataactagaaacactgatgtacacgcactgttttttagtgagatggcctggcagtgcctggaagttggcctcctggcttctgtcagcaggaatcagagatgaagaccctgagtccaagtggtcttcactgtgcttcatgaccctgtagcttctcaccctccaagggaaaaacggttctgtgattcataacatgattttattccttacagaatgatgaaattgagcccacagcattttcttatgaaaagttctatgaactgacacaaaagatttgtcctcggacagatatagaagatcttttcaaaaaaatgtaagttccacttatgaggaagtgccatataaatattatcactgtccttttcgattttttaaaacgtttttgtcctattttaatagagtatgttggtagcatctaggaatatctagtcagggttacatttttaaccccatactttatcagtgtaaaagttcactctgagtttttgagaaacttttacgtatattaattgcagcacctggaacttttttttgcattggctttactaactacctacaattttaacctgctcctttaggtattaacccattatgtgaactaactagattcaatttggaatgttaatatgtttttgaaaagttgattcattccaattatttcaaatggatgacttacatgttgtttttgaaataatatcttttgaaaacggtaaaaaaaaaaaaaaattgcagactttttctgtgacctagtgggagtgttttccttctgttgttgttgttgttgttgttttatttttctccctttatgaacagtctctggccattttaagaattcaccactacttcagggttagaaaataagtttagaattatcatcaacaaatgtcaacatgtaaatcgtacatactgtagcatcatatacaaaaacttactttttctaataaatttcttttcagcaatggagacaaaactgattatttaacggtagaccaattagtgagctttctaaatgaagtaagctttttcatacattaactccataaagtctgtgtgcagtggcttgccttctctggtgtcctcattgcatgcctgcatcatatgcccttattcgctttgcttctgacctgctgatctttccattatggctttaccaggtgcaaaaatcagctgccgccctgtgtgttcatgtgctttcttcacattggctttgcacaccactttttgttggtttctggctgttacatgtagctctggttctgtgtgtatgtgtgaattgtataatatattcatttaagtaaatgtgtctgtgtttttgcaagatgatatttaaggtactttttttctattgatctcattaaatagaaagagaatggattgagtttactacactgtagttggattctccattgctaactttatctcatacctttgcatggactggaaagctttatttttgtcttttaatggattgcatgtaagaaaaatatgttggctcaaatagaatattttgacaacaagcaaaacacttgagttcctgggtgaaaatacattgagttttaggctaataggattgcaggttaaatttgtactttttctttttataacaagctcagagctaattttagaatgtgattaacttaacaaccaaaactgatagatagaattgcttaagcacaagagaaaaatattttcgaacaaaaaaagtttgcaacttttattacaactaaaatgaactacttttttcttcacacatacaaaaaaagttttcccttcagtgaaacccatcaagactcttgttaatccaaaatggaaaattcacttttttttctaacacattaataagagtttgagtgaaggatggacagtatgcttttgtttcaaaataatttaagttaatcattataccatataaagagaaaatgcaagaaaagatggtatcatgccagataaaacgtattatcttaagaaaagataaaaaggcagaccttaatttgccacttcatagagacaaattacatcttcttttcttccgttgtgaaggttcagtggcttcaaatttataaaggtcgcactttagaaactatgttaactaaagtgtaaatgcactgatgcaagaaagagaaaatcctaccccacatatcagacagatgcctctaaaataatccttcgtgtacaatacaatgtttattttactcgaaaacatttcaaatttttccactccactggtttttagtcatataaatacaatgttcataatctttacccagatactatccacgttcttatgccacagctgctcagaagttaaattgctttgttttgtttctttaaccccttccccttcttctgccttttgttttttggtttcttgttttgttttgttttatatcccttggcttcttcatgcactttggttcagtgatcatcttaggtttggtgaggtgaagagggaagacggtttagtgtaaaggagaaaatctaccacatcttcagtttgccacttccaagacaaggcctcttgtgttctttgggatgaagccctctcttaaacattacagagaccttaatactgcatttcactgttaaagaatgaagcaactcttaggtcttgaggataagtgcagtatttataggctcttatctaatgcatttccttttatgggttgtttttgttggtgctcccaacagtcactcctgtaattcttagacataacatttaattttttaaaaatatcatcatccatactttcttgttctgccattcagattctttctttaagtatttattatttgtcaaccttttatccctcacaattacagtagacaatagtattcttttttttaatagtgtttccttctatttgatgtcttcttaacattaaggaagtaccttaaattttggggtgtgactgatggaatcggtgtgattctagatttctttaggtcataggaactgtaagactactcaggaaagtctatagcctttatttttaatccaagtgtctgccctgaatttattccttttctatcctagtgaactcaactggaagaactagacaaaaacatgaatgtcggcttgaagaagccttgtcaaacatagagaacattctgcctgttccttgcactccctcttttgagtcctaccctggcccctcttatctctccaaaatcaaaaacaccccttgggcagaacaacttcaatactcataacaaaaggagacagacagagctcactcaagaaagaatgggcattggaatgtaagggtcaattactccaagagtttaaacctaaacattttcaaaatgccttagccacatagtctcaacaagccagtattcaacactgcattggaagcccctgtgaaggttccttgtgaaggttcaatggcttcaaatttataaagcttgcactttagaaactctgttaactgaagtgtaaatgcactgatgcaagaaagagcaagtactaccccacatatcagacagatgcctctacttttaaataatcctttgagtatgatacgatgtttattttacttgaaaatatttcaagtttttccactccactggttcatataatgagacaaaaaaataaacaagtcccatgaacactggaaaggacaaggtcctagtctcatttgcagatgttgattgtctactctgatataaacaattccacggaaaaactgtttgaagtaattagagagttcagcaaggtaaccagagaaacaatgagcaaagcaaaaacctggagacacacatacactgccattaaccaggtagaatagatagtaggaaaacataaatcccatttatattagcaaaagacatgctggttcctaccaccttccagctggttaatcctttcactctttctatgaaagtttttattcatatactaatgtgtatcttcagggggctgcaaggagaggagagactatatatatagtccatttactgctttggtcaccctgtagggtgacctcctccctatccatgcaatcaacactgactagattttcagtagtagctttagacctgactcctcattggcttctcagtatttccttgttcgttgctccccaaagtgtgatccatggaccagcagcatcggcaccccttgggagcttattagaaatgctcagtcttgggtcccacccagacctgctgagtcagagtctgaatttaacaagatctccaggtgatttatctgcacattcaagtttgtaaagcaccatcctagtggattactggattcctccttggaatgtttagtgtgagtgggaagaatatgagagcgacatataccttctgttattctccattaagaatttagccataggaatccaccactcagagctaaaattttgccacatctatgtctcttagtctcatccaatggactgagggaaatcttctttgcctataatatgaaaatagcaaactagagtccaggagggatagcagaggcacttaatgtgagctgccacgtggtgagacactactactggctcaattgcttgtatgtggcaagactagataaaacctcttggctttggttagttttacctccctttccctattcctaatgagaagcaaaattgatttttagttttaccttcattctttgtttgacttcttacaaagatgataactagggtcctgcagaattgggagatgggtggagggcaggagagagggataaaaacaaggaagagagggaaaaggccttaggtggccacaggaatcaaggagtagctttactttcttgttgctggtaatcttcccccttcctcacacatatcataggatcacatcagggctcaacctgacttttttctttttgcagatgaaagaatattttaaaaggacccatgatctctttccttttacaagatctttatgctttaaatgcacaggcaaagagagagaaggagggtatttagtcttatgagtaagcttatccttgccaattattccttctatatttttaaaatattatttatgtcaacattcatctctcccagtgctacttggattgaagccagacgatgcctcttctcagcaccagtaaggacgtaatactggagttctcttcatctcctccttacttacttggacacagttctgtgacctatttttggaagtcatttagaatctcattttacaaagcactggataccatggggtgaataacctgagtaacttgtttccccaaatcctggctgaaaactgatggttcctcagagatgtgaaacattcacctcactgtgcttgtgtctctgtggaactctactgcagccttattactgtgagatcagctggaagtgatccttctcctcttgtttttccatatgaaaatgatagttttctgactctaatgcaaatcttatatttgtttccttgcctttggattacccagattgatttgtgttacctttttgaagcatgaagattttagggagagctgaagattgttatctagtgggagcagaagcaaaaacaaatgcaatttcgcattgtctgcacttcatgcttatttgctgcgaatgtaattttcagaataggggattatgatacatccattttagggcttggttttcctggctttgttttgccataggcaggatggtctaatgaatgtcataccctctgactaaattttaatagtgtttaattgggaggacatctgaaacactgaacatgcttctatccttgtgagacttaggtacttttctttttactgatgtgcaaatatgttaaaatgcatacctttatatgttaggtaaagtgattcttatacttgagcacatcagaattactcagaagtcttatgaaaaacacagattaataggttccaccccagagatcagcagattcagtagatctagggagggacctgagaagctgcatttctagcaagttgacaggtgttggtgaggctgatgctgccatccacagatcacacttcaggtagtaccttgtcagaataaacacatgtatgtatattttaaaatgcacaaaaatgtctgagttctgtctcctttcctaattttatctcttctctctcctgtagctgaatcccttttttctctcattttttaattcatatggatttgcctcatcatctccatgagttcaaaatatttaccaacaaacatatttttaaatttaaaaaacttaattttaataaggaagataaataaagtggccacctatgaacataacagtgctggggtctaaaaaggacctttttcatcctttatccatcttctaccatgatattatttatggagatgtgagaagggatgtgcctagaaagatgggtttgttgttgttgtcagtttgtttgtttttaaaacaatgcattctcaccagaaagacggagctccttgtttccttgagtagtgggctccattgcacgatggcatcaatttcctaaacaaggtgtagcatgccttcacttgcctggcattccatggtccacctcacaatcctcttccctgcatatcccataacttttgttcttggtggcctcgaggcctgctgttaacataacagtttctgttgtagcatatgcatgaatgttagctgttgtgagccataatttcttagattacaacagaagcatgcttcattgggataaattgatgaaatttgatattgattccttatgagttaatgctcttaactcggtgggggaggaggggacccagaaaaggctgggccccatatgcatgaggaaatgacatccaagtgctctgttggccaaaagcattcattctgtgtatagctcacttttccaatgcccattccaaagcaaatagggaagggaaatccatatgaacttttaacagttgctttttaaatacctttccaacaatgtttttcagtccgtgcatatatttgggtaaagagttgtcaccaaggtcctatttattgaccaggttttgctcacacctgcttatctgtcattattccaaacttccattgaggtttgctttatttattcacttattcattatttttgtaagggctgaccagggacacagtgctgtcctctaatcctcagtgaacagaaaggaagtttagtggacccactgccaacacacatacacacacaaacacacactattggagctgagtaagttagtaaactgggtttttcatcattgccatgaagttaggatgataccattgcagggacagcattgctcctggtgcctcatgtcatagcaggagctccttaggtgtcaatttgaaaacaataatgtcaccaacctcttaagtcccgtaatcattcatggactctctgcccagagaattctatattgtttatagcttgtaaatatgcttgtactgattaattttcatcattacaattggttcgttttgaaaaaaatagttactcaagaaaatgaaatttgttgagtgcccaagaaatcatggattgatgtagaaaggtgttatgaaaaagagatgatgtttgcctgtgtaacattaggctttttgttgttattgcttttggggtttttgaggggtgcacttaaattagtatattacctatttgaactattttggggggttggtgtttgctttttaaaaatattttgacctcacgttttatagatattcatgccaaatgtcttccctgttgtgtgggaactggaagacagtacaattgacatgcacactttattatgtatccttcaacttttgaaggggaaaaaatgtattctctctctctctctagttcagggagagtaacccaaaagtattcccaaatgtggactttttgaagtatactttaaggagaaaggcaggaaggcagtgaggtcctatctttgtaattataaacatgacagtctagatatattttgttttataaattataaacttagtaatgtctaatgcctcaaggccaagaaatatcaacctaaatggagttattttcttatcatagcatcaacgagatcctcgattgaatgaaattttatttccattttatgatgccaaaagggcaatgcagatcattgagatgtatgaacctgatgaagatttgaagaaaaaaggtaataaacatgaaaaaaggacttaaaaaaaaaaacaagaaaagatgcaacttttaaagccttggtttatttaaaggtatctgtaaatgctttgcaactccctgagccatggattgatgactatttttttttcctgctcttaagttcgtataaattttacctttcatcagaattagtcaatcctgactgaagtatactgttacatttattgtattattaaatacattatagtgatgtttccccatgtactttcttgtattagattttagtattgcatattgcttgaaatattaaaacaaccaatacagtctctacttgcaatccttgaaaataatttttgtcatataaaaacttataccttttctttttctcccttttgttttgccaagccaaataaatttaatacgtgatttgatgtgcagtaaccctcatttgacctctggtatgaaagataaatacaattgatatgaaattaaatagtcaggaatcgccttagctaattgctggacctttgtccctttcaaagaagctttggaaacaaagggttgttcgcacaaatatttgtcaaaggaaaggcatggggagaaattttaaaatcagtcccacagcagtgagaaatgcctgcggaacatgggagggagagctgggggtacctgagctagagcctttggcgttatgtctcagtggagaatgtaaagagatgaaagttcaagttccataggtcccgtatgtccgtgaatctcaaggtctcagtttcctcctttttaaaatctatttttttctttgtatctaatgccagtgagtgtggttgaatggtctgtatgttatctggaccctctttttaggtatacctggccctctacactccatgatttcacccctgatatttttccaagcccaatagttttccctttagttgtagttgtacagtttacactttctgctatggctgaagatacctattttaagcaagaatgcttcattccttccctctctgtcaatattctgaatatcataatttatttcacattgcttatgattacagcaaagggaggtacagcttggtagaaaatctaacacttcgcattggcaggaggtgatatgattcttgtcacttccctgtgaccttgagctaggaactggcctcctgggcctcagtttccctgcttgtaaggtggtggggctcatgcagtaatttggctagtatttcccttccctaccttcattctttgaagtttgtagagggctgaccgggtgccaagcactgtgccagatgctaggaattcaaaacaataagaaatgtccccagccttgaaggcagttgcgatctgttcaaggagaaagacaagtgattcaacaattccttggcagtgtgataaatgtcatgattgaggtgtgtccttgtttatttccaaattccttctaagttttaaaggtctatgaagtgaccattgacacatctaaaaagggtagcttgaccatttcacaagtgatggaaattttaacgtctgtcattttcaagtgtgggtgagaatggagtacaaagccattcttataaacttctggtaagaccctacattggtacaaccatcttggggaatattttggcaatagtttataaagtgaaaaatatgcctcttatacagcccagcattttcacttctaggtatgtaccctagagaatctctcatctatttcccaaactctggataccagagcggcacagttctcagatctctgctccacctatattcactctgtacctgagctcatccaagccaatggctttacatttcttctattaaactctccagtcctaacctccagcttacactacagacttgtagtagaactctccatctggatgttgaatgggcatttccaatgtatatatacaacatatttcgatccttcctacccctagatatgttcctttcaaagcctataaaatagtaccgttatttacccagtcaaaaccactgggctcatgttggacttgtttcattctttcacatcatgtctggttcatttgcaaaacctgtaagatccagcctcaaaagaaatcctaaataaatcacttctcaccatctccaacattactgactatccaaaccttcatcatccctctccaggcaatgccttctccttcctactcagtgccctacaatttatggtccacacagcagccagagtaaaccttttaaaaccaaatctaatcatgttattccaccctttgaaaccctccaaaggcttcccaacacatttagaataaaatctaaaatacttagtgaggactaaagcccaagtgatgtagcctttggctccatctccaatctcacttcaagctacctttttccttggtcacttgctctgtcttgctgtcattgaatgatgttggcacgcatacatctgcatcaaggtctttgcacttgatgatccttctgcctggactggtgtttcctgggtgtgcacgtggcttgctcctcacacatgtacgtgacctcagaagggctttcactggcccatatttaacacagcatcctgccatgcttcatcaccttcctccctgctttctctgtccttctagtacctctttgacattatatttatttgtttacttatttgtttctgtcactcataatatgagagtttcatgaaggcagggcttacctgtttcttctatcactgcatctatcctggtgcctctaaaagtacttgctctttagaatgaatgaaggtgcccaaggaaagaggtatacaaatttctactttcatttataattagaaatgacctaactatccatcaaccaaataatggataataaattatgatatattcatatatggacttctgtaccttcagtgaaaaataaatgaacaagatctacctacatagctggtatataaagataaaaatagcaagttgcaaatgcacacagtgggatagtttttacataaaattaaaaacagcccaaactacccgttgtttggataaatgcatatgtagtaaggttgcagaaccattttggaggtaaacaccaaaactaggatactagttatctatctggtatggaatggaattgaggtggggtatacaggatgctgcagtggcatcagaaattatgtattcttttacatgtaagtcaaataatcaaaaatgtaaatcaaataaggcaaaatgttgagatctgaccacactggtgtaggcccgtggctattcattatgctatcatctgaacacttctgtattagcttgaaatcagttcataacttgcaagttcttaaataaaacaaaaacttgaagctgtcgatgcatcaaccatttataagttgcataaatactgattgttgctcctgtagttaccacgtgggctctaccccatgtcagaaaggtgtgatcgaaatgaagggtggcttttggggccacgtttcaatgaccactgtatactcttctcaccagtcccataacctgacttttagataaaattgaaaactgaattgtttaaactcagaagcaccatcatctccaagaaaaatcccttttccaattcagtgagaacaatgtcttataattaatacattttccatttttaaagagcacctctcgtatctattctcatttcccattatgaagatcttggaagtcagataggtccagtctttttccccaattgacagaagaagaagctgagatctaggagccaaaggagtgagtagcaagagcagaacttgatacaggccccctggacccctggtcaccataactcccagtgctgtgtttctgaacttgggggaccatgtacatctgccatcatggatgtaaaagcagaataccacctgtttgtggaattcattatgttacttataatgtgcaactctcttatttcattcaagttctgacagatgaaagttcttgggaaagagactgtgaagacgtttttactcttataatttaagctgcctcagcttccatgaataaaacatgagatatgcatcttcagagctacaagtgctactaagatgttctttttcccctaggccttatatcaagtgatgggttttgcagatatctgatgtcagatgaaaacgccccagtcttcctagatcgtttagaactttaccaagaaatggaccatcctctggctcactacttcatcagttcttcccataacacttatctcactggcagacagttcggcgggaagtcttcggtagaaatgtacagacaggttctcctggctggttgcaggtgaggaactcaagatggcaatttgttttttgtgtgtgatgcccttcagtttaatttacttttctctgaaaaacaggaaatagtaatcaggatgaaaaggaaatttgtttattccctttaatggattatcatggtcatttaacgttgagaaaagaaggacagtatctctttcggaaaaatcttcagtcatccaaaagactttactgtgaaaagacttttctttactgtaaatttaaaatatgcctccaaaaccacaaaaaagaaaacatgcatattgtaagaaggcgtgttgagttttttgttgattataggtacttgttactagcaccatgctctaaccaattgagctaactggccattgattataggcacttgtaaattagctttttttttttttttttagtatttattgatcattcttgggtgtttctcagtttctcagagagggggatgtggcagggtcataggataatagtggagagaaggtcagcagataaacacgtgaacaaaggtctctggttttcctaggcagaggtccctgccgccttcggcagtgtttgtgtccctgggtacttgagattagggagtggtgatgactcttaactagcatgctgccttctagcatctgtttaacaaagcacatcttgtaccgcccttaatccatttaaccctgagttgacacaccacatgtttcagagagcacggggttgggggtaagattatagattaacagcatcccaaggcagaagaatttttcttagtacagaacaaaatggtgtctcctatgtcaacttcttactacacagacacagtaacaatctgatctctctttcttttccccacatttcccccttttcttttcgacaaaaccgccatcgtcatcatggcccgttctcgatggtcactgtctctttggagctgttgggtacacttcccagatggggcggcctggcagaggtgctcctcacctcccagatgatgggcggccaggcagaggtgctccccacctcccagacggggcggccgggcagaggcgctcctcacctcccagatggggtggcggctgggcagaggcgctcctcacttcccagtcgtggcggctgggcaaaggcgcttctcacatcccagacggggtggcggccgggcaaaggctctcctcacttctcagacggggcggctggcagaggcgctcctcacatcccagatggggtggcggccgggcagaggcgctcctcacctcccagatggggtggtggccgggcagaggcgctcctcacctcccagacggggcagccgggcagaggcgctcctcgcttcccagacggggcggccgggcagaggtgctcctcgcttcccagacggggcagccgggcagaggggctccccacatcccagacgatgggcagccaggcagagatgctccccacttcctagacggggtggcggccgggcagaggctgtaatcttagcacttcgggaggccaaggcaggcggctggaaggtggaggttgtggcgagccgagatcacgccactacactccagcctgggcaacactgagcattgagtgagcgagactccgtctgcaatcccagcaccccgggaggccgaggctggcagaccactcgaggtcaggagccggagaccagccccgtcaacagggcgataccccatctcctccaaaaatagaaaaaccagtcaggcgtggtggcgcacacccgcaatcccaggcacttggcaggccgaggcaggagaaccacggaagtccggggcagggaggctgcagcgagccgagaccacggcagtatagtccagcctcggcaacggagggagaccgaagaaaggagggagggggagggggagagggagagggagagggtaaattagctttatttgatgtaaaagttcaaaaatttagttctctgagagtagaaattattaaaatcgtttttgttttatagaaactggcaaatatttgagatttaaaatatggcaaaaatgatgaaagtgaaaaataagaaatgtagttacattatgtttttttcttggttataaattaaacaatactttatttttttaattcatttttttttggatatggaaatatgttaaaagaaattaactgtcttactacttccatttgcaaacttcctctgaatacctgagtatgaatcactaaacattttctgaaatggccaaagtaacattatccagcctatcaaaattaaaagtaatttttttaatttattttattttattattattatactttaagttttagggtacatatgcacaacgtgcaggtttgttatatatgtatacatgcgccatgttggtgtcctgcacccattaactcgtcatttagcattagatatatctcctaatgctatccctcccccctccccccaccccacaacagtcccatgtcatctaaaacccagcccacattcatatttccccagttgtccccaaccaaattgtccttttttttttttttaattgggacagagtcttactttgttgcccaggctggagtgcagtggcatgatgtcagctcactggaacctcccctcctgggttcaagcaattctcatgccttagcctcccaggtagctgggattacagcctcccaagtagccatcacacctggctaatttttgtatttttagtagagatggggtttcaccatgttggccaggctggtctccaactcctgacctcaagtgatccgccttcctaggacacaccacgcccggcccccaaattgtcctttattgcgttttgtcacaagtaggatttcatccagaaccatgatgcttgttatatttcttaagtctcttaatctcactcagacaatccccttttgataataccaaccagatgaggaatataatgtggttttaacctgtatatgccatgaaataatcaggttacttaatttattcaattttctgttctggaagaaaacaacttattttgatgtctttcttttaatttgtatgaacactatttcattgtaaagtttcaatattgtaacttcactatatccctagatgtgttgaacttgactgctgggatggaaaaggtgaagaccaagaaccaataataactcatggaaaagcaatgtgtacagatatcctttttaaggtaactttaaaaataattacacagacttttccaaactctgtgaaaatgcaggaaatagggagatggagaagagaaaacaaatgattcattttctcaagcattatgccttcatattcccttcttccagtcttgaggaaaaagtcaagacaaagatcttttccactgaacgtccccttcatgatactgttcttgctttcaaatggtgactgtgttacataacaaggtttctctggcagagtttacctagttttacttaccttagaaacagtgtctccttttgttatctacttatttgcttatttactttacattattcctaaaggacttcaaggtggcataaaaagataaatagaatacaggaataaaatagattgtaaatagggcctacaagaataagaaaggccgggcgtggtggctcacgcctgtaatcccagcactttgggaagccgaggcagggagatcacctgagatcaggagttggagaccagcctgaccaacatggggaaaccctgtctctaccaaaaatgcaaaattagctgggcatggtggcacatgcctgtaatctcagctactcaggaggctgaggcaggagaatggcttgaacccgagaggtggaggttgcagtgagccgagattacactgttgcattctagcctggacaacaagagtgaaactccatctcaataaataaataagtaaataataagataatgaggttagacaaatcaaaagaatgaaattctgtggtttgcaaatgtcagctgcagctgtctgtcggtttggtataactcaggatagatattacaacaccaggagcagcggttctcaactccacctacatgtgaaacatcaccatgggtattttcaaaaacataggtgctgctgggcgtggtggctcatgcctataatcccaacactttgggaggtggaggcaggtggatcacttgacgtcaggagttcaagatcagcctggccaacatggtgaaaccctgtctgtactaaaaatacaaaaattagctggtgtggtggcatgcacctgtaatcccagctgaggcagagtcaggagaattgcttgaacacaggaggcagaggttgcagtgaaaccagatcatgccattgctctccagcctcagcaacagagcgagactctgtctcaaaaaaaacacacatacacacacacgcagatgtctagatgctatgcatagtatttctcttagccaagatattggagagttttgaccagcaatgaattcaagataatacttcttgatatgtaccaagagtatattcaagtgggaagccatgaatttgcatagccaggaagaataactaaatgactacctcagccacaaggaatgcctcaataaaatatttcaagattatctaaccttgggctttatcatgtcaaatggatttgcctagataactattgtgaaatatttttctgattaactgaatgatgagatttgccctgtgattagctacaaaccagtaagaatttggggatttttaccaaatatgatgctccggttgtagaagtgctggtttgaagcctttctttctaaagctaagcagagacggggccaaccatctcttaaagcctctcctatttcatggagaatagtgaaagggaagattatgtttagctccttcaaatgttgttttctgtaattaagttctgtgttacagatggggggtcaagaacacttctatgtttcacttacatgttgcttgaccaacgagaaccccttcccccggccttgtaaccaggctaataggaaacaagggatactgcaaatgtcactttagtacacagaggtctacatcaagttaatgaagtatagcccaagactgatttccaaacacagaggaaagtcagtgaaagcctccagcagtcctgaggttactacccacacttttctgcatgaggtggggaggagtcatacagtggtcgggagtgaaaacctctgtgccagagatcacctgctcctcaagaagaaaggtggactctgaactcctggcctggcagattaacaagccacagactggcatgccatttaggtgaaatctcttgtaagttaatagcaccataattctggagaagtaaaagatagcttaaaaaattgtcattaaccattaactgcaccctggctataaccacagggaactcaacctttagaggtgtcaaggtagatgggggctccaggtctgaattgctggaattgactttctgaaagactcaattaatagtctctgaatagttttgggtgccttaatttttttgctcttttctctcattaacgtttttttttgtttttaaaggatgtaattcaagccatcaaggaaactgcatttgtcacatcagaatatcctgtaattctctcctttgaaaatcactgcaggtataatgatccattctgccacaagtctctatgtggtattgtttcctaacccctaatgcccactcctgctctacaactttttaaatagctgaatagtttgttttgtgaagtactaagttcaaataattctccagcaagggcacctactcttatgcaaagcaaaaaacaacaaaaaaaggaaaaaacgacaaaaaaccacccttgtccccccaaaccaaatcattttaatgtgtttcagaaatacttgttccaaataaaagttcagagattgggacaccttacttaaagttccattgagctggaagatttgacagtatatttgaaatcagatttgatgaacttgaaagacattttttattcttctttccagctcttagttttggaacagaatctccttctccttcttttaaaattataccagttaaagtttttgatacatctcacattagcattaagaggacaataatgcattttgccaagtgagaatctttaattgcctagtaatgggtgtttcttattcttggacggttaatgggtgtttgaatttacaaatgccacttttttctctccagcaaatatcaacagtacaagatgtccaaatattgcgaagatctatttggggatctcctgttgaaacaagcacttgaatcacatccagtatgtatttttaacaaaccatatttctagcatgaatggatttgttttgaaaatttctgaagggtcaagtagtactagaggactaatgctaaagatcttcatatttatttaaattctttggtacggaaagcttacatcatgcttcagagggatgtaaagagacacaaaataaacatctggttcaatttcatttggaggatctttgggtcttatggttttcagatctcagtcttaaagtttcataaagcacccaggccaagagtccagattcaggtcagttgttctcaaattcagttacatgttagaatcacctacaaaactgttaaaaacacctgtgccagggccccacttggagactgatttaattgatgcagggtcagccctgagcatggtgttttaaaagccctccaggtgaactgtatatgcacccggtattcagaacccatgggaggctcatgctgtggaaagtgccctggattgatgtcacgacatcctgaagttcatgttcctaactccaaaataaatcactgagtaatgttgcacatacatttttgaacttcatgttaaacctgctaatttcttcataaagcaaagaacattaacctgtgctccatagataggctttatgagatctgtgaattcattctaattgcatgcaatttttttgtatatactcattctagagagttaatcacatttttataaggatccatgacctccaagagattaagatccacaatcacaagatgttatgagctccaaggcagctaatgaaatcaaagtggaaagacctgctattgacagcagcacctgatgggctcaaacctggtagcatgaggtagtggcagaagaacatcacagcaaatgacagcaggaaggtgctttgtgctacatgtaaacactttatgaggttcttttcagaagtgtgtctatgggaactgaaaaaaaatatgagagacaaggatatctgtatcctttgtcccccttccttcttccctcgaacttgcagaagcagttgctgcaggtgacctgcccatatccttgcagtgcctcctgtttccctgaacactggcctgactttccactgccaacatccacagctttttgcctgagagtgagctctggtcactggagcctgctctgccacacatgaaagaccagcagtgccagggaattatcacccctatcccatgcttcatccctcccgaggtgggataaccctgagcacctgctcttctctgccttccagggtttcccagcaggatcgtgctccagctggctgcagtgataacacacccttgatgagctgcctgtcttctttttctcactttcccacacctctgttggagtttccttccaagtagacgacctggtgcaatactacttttctctgaggctgattttaagggaacccaaactaagaaacagctctgatttattttatttgtttttacctaggccctccatttatctttctgattaggttaaggtgattgcttttgtggaaagttcactgtattcttagtgaagtgatgtgcacatacttttaccagctgaagggtgtccaggttcttggcatcttgaacaaagaatcggacaaaatgcacaaacaaagcaagggaagaatgaagcaacaaaagcagagatttattgaaaatgaaagtacactccacagggtgggagcagcctgagcagaggggctcaagagccctgttacagaattttctggggtttaaataccctctagaggtttccattggttacttggtgtccggtctatgtaaatgaataggatgaagtaaagttataaagtcatttacttggtgtacatcctttgtaaatggagaggatatttcctgtcatagctgaagtgtttccatttgatttagttctaggaagtcagcatgaataggccttatattccctgcctcaagaccctattctcctttgaatacaggacaggtgtctggggaagcatgggtaatataaatgggaataagacctgctccaaaagctaaagagctttcaaccttgggagtgggagcaggacacaaatgtgaacacataactagaaaagaagatggcgtatggtgctttatttgttggaggtgtcctggtacaagagagatcactggggaatgggccagttataccacgctgctggaaggaaacagcatttcaacaaagggttttatttgaggcaagacagacatatgagtgcacagtgccttacatataataagtagtataaaagcaagttttgaaaatgaatggatgggtggaggggtgggtgggtgggcatatagagagatgggtggaggaatggggaatggaagactagatacaggacggttctgtagaccagaggtgatagcatacaggggcacctcctttgcagatataaatctaagcaaatgatgctgtagtcaagttcagattccaggaattggaacaactcccttcttgattcccttatcaaacctacaaaaccacaaaaccacaatctcaagtgttgagggttgggtcagcctactcagcagacaggcttactatacagcctgacacttggggggatctggggggcctctcacttgggaaagctaattctgaacccagccatcacaattgtcccttgcactttaccagatacttaaaaggtgcaaggccctctggggagcaggaacccctccccggcacatcccaggccagacccctgctccactggggaggttggagcagctctgcacacctctggaaactatgtggatttcaagtttgcagcactagtctaaggaaaagctcaatgggtgtgctaatttgggttggggagtgaaaacagaaggctgtgccgcctgccatctagtgggtgttgggttgcatcactcccaggcctcccaggctcctcctggactgggaaggagaatggagaagcacagcccttccttaattcagctctttctgtttctctctagcttgaaccaggcagggctttgccatcccccaatgacctcaaaagaaaaatactcataaaaaacaagcggctgaaacctgaagttgaaaaaagtaagtgaaacacacacatttataatggaagcatacataacatgtgtggacatttcagctgttgagaattcaatttattttaaaaccactgatttttgggggaagggtgtaggggtgatgttacaggtacttttcagagcaagattgccacatttccatttaaatttaatttccatatcaattaattcatgcagtaggaaaagcatatctatatattcaaatgccagaatttggagagggcccaaggaaaattgagaggaaagtagaagcattttagaatttctcaagatataaggaaccagcattttataattttatacactctaaagtcctcataagtttcccttttcagtttgccccgtgctctatacctatctagggatactaggtacatatgagtgtgtgactgtgtatatgtgaatagagagatctagagacaaatgattttatataaacatgtttccttttattctcccaggatgatttccttgaaaatattttctttcagagtatatcctagttcagtgaattaatggtatcaaatattggcatgattacacttcattttccccccaagtattctaaatgaaaaattttaaattatgttaatgacagtttattttattacaaaagcaataatgccatagaaaaatcaagacaatgaaaagtgtaagaaagtaacagcactaacatatattatacacgtattcatatactatagacacatgtacgtaatgtacatgtgtagatatatacccacatttttaacatgactgagatcatattaatgatactgagtttaaatttttaaaatttaaccaagtaagtatacttacatcagcaggatatacatctacatactaactttaatcctaatgtatgaaacactatatagaatttaatatatatgacatagaattgtatgcatttattatagcatgatgtaacgagtcccaagttgatggattttcactactataaacatgcttgaatgttattttgtatgtttgtgcaaccctctccttgaaatcaattggtgcaattagagttattcagccaaaacgtatatatattttatattgtgatatagtttgttatgctttcttttaggaaagttctaccaccttagactcttcaccagtcatatatgagagtgcctgtttcccaccaatatccttaatgctggctgttggccatttttaaatgtgtgtccaactcatagaaaaaaattggtaccttaggggtttttttatttgtgtgtcttcaataactccttttttgcatattactatttgtggtttgtccctatgtgttttcccatttttattattttgtttacctttatctttctgacttatagaaaaattatttagtcttattttgtatagtaggatataatccccattaaatcagttgcaaatattttttcctgaagttttgttgccaacctgcctattttctatcagttccccataactgttcgtaaaccttggtctgtgccagattctccaaattatgggcttttgttatctagccttaaatccttcacgaggactgaacctcctctcaaacttggtgaccagaattttgggcatttcacccatgtccccgcaattcttcatcatgtgtatataaggtggttgttgcaggtttcttacaaggtcgagaccaccaggaaatggcgagagagagatcactgctgaaccttagaaacatggtgccttggtgcctgaacattctatttcttctctcttttcacgtcctcctcagtgtcgatctcaaggcctagggtttgtatgttacctagcatctgtcaccatctctttgcgtgtttttgctaacagaacagctggaagctttgagaagcatgatggaagctggagaatctgcctccccagcaaacatcttagaggacgataatgaagaggagatcgaaagtggtgagctgtttgcttttattttaagttacatgctttgaaaatactttttaaataagaaaaccaggctgggcacagtggctcaagcccataatcccagcacttggggaggccaaggtgggaggattgcttgagcccaggagttcaagaccagcctgggcaacattttcgtagagatgagaccccatgtctacaaaaaataaaatattagccagacgtggtggcctgtgtctgtagtcccagctactggggaggctgaggcagtaggatcccttgagcccagaggttcaaggctgcagtgagctatatgtaatcctaccactgcactccaggctggacaacagactgaggccttgtttcaaaaataaatgagtaagaaaaccaggaatttctttcagaagacccttttatataataatgccgttttaattcctcatagtaatattttggtattcttggtattttgccaaacacttcccattttttctggctactaaattttaatggccttgtcatctcccttcctattggccattcagctattcagcagaaattcttagccagagaatccctgaagcacttgctgtagtaggcagaggaagcaatataaggcacattttgtaatccctttgtatagacaaaaacatgaacttgagtctgttaatgatgagagtagagaggcaaataatttaagagaccctcaggcaaatgattggtttgtctccacaaagtgaactagaaactaaaagccagtattaaaatttcaagttcaaattccttcaaataaccagctcaccagaattatctctgtgtagctagataattttaagaaggcagtcttgcttaaaatatttgagtatgtgctattaccttctcttttactttgatcacatagcaacaatcataatgttcagttgtaaatgggtcatttgagagtttggggatgattttagagaattatttgtttgttatgtttcatgagaattgatgaacgaaatgacaaggacttgtgttggttatacaatgccttggatttatatacaggcataccttggaaatattgcagattcagttctagaccactacaatgaagtaaatattgcaaaaaaattattcacaagaatttttgtttcccaatgcatacagaaattatttacactgtactgtaggctagtaagtgttcaataacagcattatgtccaaaaatgtaacttaattaaaaaatacctattgcttaaaaatgctgacaattatctaaacctgcatcatattgaaatctttttgtggagggtcttgccttgagtgatcagggaggcagttgccaaagattgggttggctgtggtaattttttaaaataagacaacaatgaagtttgctgcatcaattgacccttcttttcacaaaagatttctctgtagcatgcagtgccatttgatgacactttacccagagcagagcttctttcaaaattgaagccaatcctctcaaaccctgctgtgatgccttctcaactaggtttatgtaatattttaaatcctgtgttgtcatttcaacaatgctcacagtatctttacctggagtagattccatctcaagaaaccaccttctttgctcattcacaagaaacaactcctcatcggtttaagttttatcatgaaattgcagcaattcagccccatgttcaggctccttttcaaattctagttctcttactctttctaccacctctgcagtgacttcctccactgaagtcttgaacctctcagcgtcatccatgggagtctcccaaactcctatgaacgttgatatttttacctcttcccataaatcatgaatgttctttcttaatagcatctagaatggtgaacatcagaagcttttcagtttactttgcccagatccatcagaggacattctcttttaggaaagctagacatagagctaaaaatccaaaagttggaagaattaactaaccttattcaagactccttaataaagactcctgactgtggaacagactttataagtgattcagttgcatgtccagtccttgggtttgacattactcccagagaaaagtcataatgactgtactttcatttgttttatgtggcagggagggtctaagaggctaaagatatctgatactactcagttgatactcgttattatggtcatctgttactatgcaataaaccatccccaaatttaggggcttataacaacaccttatcattttctgtcataattctgtgggtcatgtgggcttaggttggtggttctcccttgggtttctcctgcttttgtcagcagatgacatctggggctgactggttcccttgggtgggttatcccggacggcttactcacatgctggcagtggatgctggctgaacgctgggagctccgctgggcctcactgaccatagtatccctgtggcctctctctgtgacttgggcttctcatagcacgatggctaagtcccccagatggaacatctaagagccagtgtctcaagaggcaggaagcagaagctgctaaattagttaagagctaggcctggaactggtgcagtatcacttcctctatgttttattcatcgaagcagtctcagggcccatccaagttcaagagggtgagtgagtgacaaggtcacgttgcataagagcacagaggagggcagatgatacggcagctgtctttggaaaatatagtcagccgtgatgcctactatattttttcacatgtttttgcaaataataaatctaaacaagatttaagaaaaatatatttatagaactgtgtttcaaatggtcaagaaaatactcctaagatacaaaaaagatgactattcagtaaaaccagttcctttaagttaaatttcatagatggtaattaaaatatgtaaggcattactgatacgataatccagtaaaacaaactgcagaaataatggaataaattaacaagaaaacaatgttaataataattactaccatcgttgtaccaacagtggaccaggcagcttacattatggccttatctaacctgtatacagcctgatgaaatgggtattattattattattattattatttttgagatggagtcttgctctgtcacccaggctggagtgcagtggcgcgatctcggctcactgcaagctctgcctctgaaatgggtattattacaccaatttttcagatgagaggactgaagcttagagaggtaacatattttgcacatgatcccacagcgggcaaccgattgcactaagattcaatcccagagctacctgattcaagtcaagacttttgtacgttacagtactgccctttcaattcacaggaatatggtgaaaacatagatatgcaaaaatacttttttaaaaaggagaaagaatagaacgaatgaaagtcaaagatgtgatgtttcctaaacacacacagtcatctgaaattagcatctgtatggcttcatgtattattcttaaaggtgctttcccaccatctacatccatatggtaattattcctccaggcagaaaaatatttgcctctagtgactcccatgttattccaaaatatacttgagatttgggttaagtcttaacagaaataaccacatgatttagtatccacgtaggaaagtacctaaggacagaatcatccacctagatggcacaaggctcctgtttcacctgttatgtgtgtgattcttaggttgcctcagtaatacttggctttggttctggtcaactagtcggctataattaccttagtgccactgtatgaatctactatctatgtgtggctagagtctctaatttaaatacatcaacacagcaggcaaggggaaaccaagcatagttcaataggggaggcctgcctggaggctgtagaaaatagaaaaggctttcagtcagtgaaagcaggtgcccaggcattaggctggatttagattcagaaggacatgtggctcccaggataggagacaagtagtggagaatatcaaaattgtatgtggttataggtgtgtctgtgcatatctgcacactcagaaagtgatcatgtattcatacaattctcttaaggtggttagtaagtctccaccacttgtttggggtatgccccttgccttcaagtggtttacatctgtattggcagtttagacataaattaaattaaatgaaatgaaattaataaattaaatgaaaatttaatagtgacatgagaagttttgaaatcttggttactgactgtaggtcatggaaacctagtcctggaagaactatgttaagaattcaagagacaggtagatccattatcttgctgtgtgatttcagacaagtcaaatcatatctctgcatctagttcctcgtttataagtaaagacagatgctggattagattattttaagatgtattccatttcctcaaatccttttcttcctgcctaagccttacaattacccacttgttgttgttgttgttgtttggattttgtttttttaatcgtctgcctctagaatatcccttcatcagaattgttagctccagaagaggaaggtggctgtttctttccctcaccctcctcctgtgcctggagagatacttcacaaaataaaacagtctatctagaaattctgaatccagatactaccagttgaaagataccactgttttattatgactaagaaagaaaaagtagtttccattcactggaaaaaaccgtcagttgaagaacacactgcaatatcagaaatattaaatcaaaaaaagtacatcttagaatcagtgaaatcatttttcatttactcctgttctttcattctcctttgtacttttaaacatgctttaaaaaaatctatctcattcttatgggtctactcatttcctttctgaatttctcagaaattattttagtgggtttttttgttttgtttttacagtaacgttccctcatgccctgtggtgtgaccatgtggatttatattgtcctcatcctgatgtctgtgggtttctcctgatcctggctagattttaggcaaattctttatctgggaattactgcaaatagtgattgtgtgaatccaaatctcacctcagcatgttgcacattttccagcaggtacttcttttttttccccacgaacatcctgggtggattctggcattcttgtcactttcctggaccaatgaacacagtgtgtgtacttcctttcacagactagaccacgctccagggacaccagctttatttggcacccacttccacttctcctcctacctgagcctgacaaatgagccctgagcctttgaaacctatgctaggtttgacaaatagtttgcaggagtagcacaatccttctgaggcctttcttttttctaccactccaagctataagtcattatgcccataaaattcaagtggacattttagtctctttcaaaattatccgatgtatttgttttcttgcatcttcttatttgctcttgatgtcatgaaagatcaaaacacctttttatgagttatagatattcctgcagtgtttgaggctttcatttttagaattagtatactagaatagaagtagccatccacttaaaaaaaatttattaagcatcaagcatttcaaaccacattttaggagcaggagaaataatacataacaagatgtgctccttgacgttgaataggtaagagtttagtgagagttttacttgaaaaaatactgcatatatcaatgtccccattttcttttagcatcctttttctctaaaagtgcttatgttctacccaagattgtgaacaaggtctgactacttggcagtggtttggtgtcatggattttccatttgtctttcacacagctgaccaagaggaggaagctcaccccgaattcaaatttggaaatgaactttctgctgatgacttgggtcacaaggaagctgttgcaaatagcgtcaagaaggtcagagtcccctttctttcatcactctcaagaggtagcagctgttatttatgaaattttggaaatgtgagaaccacaagagaataaagtaacctataattccccttctaaattgcttaggatacgagtctgtgctgggtgaccagaacttgacacatacacaatattaaatttaaaaggacatttaaattactcattagtcagggccagtgttaaccactacccatttggccagtgtcctctaaatattatcatttattgtgttattgcagctggggagggagaaaatgacagcatcccaggggtaagatttaatcttgaattcatcaggaaaatgacccctgaacatcccgagtctagccctcatttgagaactagtcctgctaattatataccttccccctaaagtacagtaagcataaaaatgtttccagatattcagccaaggaaaatagttattcatatacttaccttttgtcaggcatagtctaggccataatgacctaaaagtgtaaaacacacttgccttctgcccttaggcagctcatggccccctgtagtttagggaaagggatcggaaacagcaaacaagcaagtagtcaaataactatataattacaacttacggtgagtgcaattatgaacataaacacgcatgctgaagaataatgaagtagaaagaataaggaaaccagaacgcaaagggtcaagaggaattggccatgcacagaggttgatgaatcactttccatgcggagggaccacagtaacaacagcaagggctgtgagtagagtggcttgagtgagggtggagtgagacgagatgaggcaggtaggtgggaactgggtgatgtaggattttggaggccattatgagaaattcaaatattcagtgaaatgtgacactactgaaaaagtttagagaagggggcagtgtagcctgattcaagttttaaaagattgctgtggttgccatatggagactagtttaggaggaaacaggagtggaagcaggaaaagcagtgaggacaggctgctgctctaggccagacgagagtccccgatggtcaaaccagacaatgcatcagagaggactgagtggcttcaagacatattgagaaatgggacagcctactgatggatggaatgtgggaatgagagagaaagaagaagtgagatgaccctctagtgtccttgtttgaggaactgggtaggtgatggtaccatttactggcatggggaagaccgaaagagaaagaattcaggagtttcaaatgggatgactatttgagatgcctgtgaagtattcaaggggaggtgttcatatagcattgccatctgactctttctctgggttcatttcctaactgtctaactttgggtaagttacttaacctctgtgtaccttagtttcctcatctgcaaagtgaagacgataacacctatttcatggggtcactgtgaagagtggatggtttgtgacatgtcaagagcttagcgtggtgcctggtacatggtaactcctgtaaaggtattagttgctggtatattatcatccttttcatctttatcattgtcattatcctcatgatcactggcgtcattatcacgcgtatatagaagacaggttgagctagagatacaagttgggagttcaaaagatcgtatttgaaacaatggaaatactgagatgattcacaaggaaaggtggaaaagaaggcccaagtggagccctagttaaaagtggagccagaaaagaagagcaaggtatggctagagaagtaggagggaaattaggcagtgacaccaagaaaaccaggaaagagaacagtgttaacagaaggactgagtggttgactgtagaatatgttaaaaatcttagacaaattaaatttaacagagtttagttgagcaaaaaaaacaattcccaaattgggcaggacccaaaccagaagaggttcagagaaactccagtgcagccatgtggtggaagattttttggcagaaaaaggaaagtgacctacagaaaacagaagtgaggtacagaagcagctgtattggttacaggcttatttgccttatttgaacagaggttgaatagttggccacctttgattggctgaaactcagtgattggcacatgagtaggttccagtctgtttacacacccattcagtctacagtttactatgtgaaagtttatgaaaaaacctttagaataggtaaagagacacctttaggctaaacttaatttaacaaatgctactgactgattaagtaagaagactcaagagtgtcctttgggttgttagcatggaggtcgttggcaaccttaaagagacatttcagtggagtgccaggcagggtggtgacactggatcacacagatatgaatgactagagactatgcttttgagaagttttgatgtgaaggggagcaagaaatggactggtggccaagggcacctgaggagtcaagggagtgttttctttttcggatgaatgaatctggagtgtgtttgaaaacttggaagtggtgcagtagagaggaagagattagttttgcaggaaagagaggggataactgcctggaattccttgaggaggtggaagagggtgggattgctgtggtgcaaaggtgtggcccttcacaggagcaggaacacctgattagtgaagacagtggatgaagatgcaggtaggcagatacatttggtgataggaagaggggagagtatttgtctgatgagcaaagccaaaggaatattgcctttacacactatcttttctgatatagggaattgtgactactctgagaatattgaacatctattaagactcaagagtattgttttaatacaaaaattagccaggcgccatggtacgcgcctgtaatcccagctactcaggaagctgaggcaggagaactgcttgaacccaaaaggcggaggttgcagtgagccaagattgtgccactgcactccagcctgggcaacagagcaagactgtgtctcaaaaaaaaaaaaaaaaaaaaagttgctaaagccttcatcaatattgtcttagtgtcttagtcagttggtgctgctatcacaaaaataccattggcttaaacaactgaaaactatttgtcaccattctagagtctaagaagtctaagatcaaggttccacgcaatcagttcctaatgtggggggccttcttcgtgtttatgtcctcatgtggtggacagagaataaggaggcaagctctctcttggcttggccctcatgaccaaattacctcccaaaggccccatcttcaaatgccatcacatgagaattaaggtttcagtatatgaattggggacagtatggggggctgcaccagcaaacagtccataacaaatacccagacatgaatgctgagttactcaagagtgaccattcatgctgcttttcctaagccccatgactaaagcactaattaaataattataataaaacatctaagtaggtaaagactgtccacgaaggagggaaagagcattaagattagcccttctggtgcataaaacagtgaggccatccatggctttttgtcatcagtaatgtcccaccttagcaaataaatagaataacaagtttacctacacttatttaaatatctatgtatgtatggctaataaatttggaattttgccctttagagaagtaaacaaattatttcctttctctaattaggcttcagatgaccttgaacatgaaaacaacaaaaaggtaacaaaataattcccttgcacattttaaatcagatgcatctaatttaaaaaatcttcaaaggaaggaatcagttgtggtgaaaaaatgattaaatcctgataaaaatcacaaaactagggcagatgagtaagatgattttctaaaagtaggtatttaatgcagtaaggcattttcttcactggaattagagatttcattcctgcagtggaactacatgatcatcagcatattgaatttgaaaataaaaatgagtgaataggtcatcaaatccatattatagcataatagaaaggatgatcttagttcccactacattgacattctggaagatcactgattaattttacactgcataacttctaagagtattatttgatgttattagctattggccttattgtaggaaaggtaaagttacattttcactttctttcatcctcttcaaagttcttcaagtgatcacagtggttttatttagtaagtatttatggtttatcctacaacagtgaggctgacagccacaggcagaagtttgcctaataacttcattctcatacttcagaggttcggaaaatactgccttgctgcctgtggggtcctatcctatttgaagttgagatcgtatcttctcaccctctaaatattaaacttgaaagaattatgaataaatatggtcgcaggcctgtcccaaaatatttgtgagtacattactctcttgttctagaatttcataattcataatttgggtcaacagtatacagattgacatttggtcattgtcatttattagctaagttattttaattctcaaggcatcaatcttctcatgtggtcagtgggtaggactctaatcctcactacacatcacagacagtaatgagactgtgtgtgcaagaactcatcctggtgctcagctcatagcactggtggtatttattattattaaacacacatggaaggaacggacatggccgttgtttggtgggggagcaggaggacacattaagaaaatgataaaaacaaaaacaaaaccaaattacattacttgattattgtttcaggcttttattggtgaaatcagtttgataatttagaatgctcagattgttaagtgatcagttaagacaaacaaattgaccatttttttttttttttgagatggagtctcactctgttgcccaggctggagtgcagtggcgtgatctccgctcactgaaagctctgccccccgggttcacttcattcgccattctcctgcctcagcctcccagtagctgggactacaggtgcctgccaccatgcccagttaatttttttgtatttttaatagagatggggtttcacagtgttcaccaggatggtctcgatctcctgacctcatgatccacccgcctcagcctcccaaagtgctgggattacaggcgtgagccactgcgcccagcatctgaccattttttaactcatggattacatcatccaactaaggaatttatccaactagattcactttatgcaggaaatttagctttgcaaagttctcagcaaaaatattgatcacttttgaaggtatttttgttgttggttttattgttgttttttctatcaataaataaactaatttgttttcttttttctgtatgcaaagtaatgcagtttcaatatgtcctatgcagcaagttattaggttacttttaagattaagtgctttttaaatactataaaccacgtatgtatgttgcttacattctagagtgctacagtgaaacatagtccccaaagaggcagcatcattagcacctgggaactagttacagcaatgactggcctcactgcagactcacttcaacagaaactctgagtgtggggcccaggaatctgttctagtttaaaaagtcttccaggtgattctgatgcacgctaatgttcgagagtcactatttttgatgttgtgcctcaatttgtaaaaatatgatgctatatctatttcatagcattgctgtgaggtccaatatagtaatttctttttttttttttttgagatggagtcttgctctgttgcctggtctggagtgcagtggcacaatctcagctcacctcaacctctgcctcctgggttcaagcgattctcctgcctcagcctcccaagtagctggaattacaggctcacgccaccacacccagctaatttttggcatttttagtagagatggggttttgccatgttcgccaagtttgtcttgaactcctggcctcccaaagtgctggattaaaggcatgagccaccgttcccggccagtaatttcttgaataaagtcccttaaaaatctaaaaatgtcctacaaatgtaagataagcttaatattttatgattacctccttttgcattattcagagctacaacagacactaacttcttaaagtatcctttagcataattgaggaagaaaaagcctttacctttcaatttgtgtgtgtgcaattatctttattaaggaaatctgcagcacgtatccgtgggtcctactgaagtcatcaacttatatgttttcttccttgtgcttgtagggcctggtcactgtagaagatgagcaggcgtggatggcatcttataaatatgtaggtgctaccactaatatccatccatatttgtccacaatgatcaactacgcccagcctgtaaagtttcaaggtttccatgtggcagaaggtaacaccaaaggttaaatgcagtcgccttttttgcttgattttcttttatggtgctgatgagcttttatctaatttgttgccatttttctttgtgggcatgggggctgttccacctcaccttatttttgtttcacagaccatagaagccaccttggtatgtggtgacattacattgtcattcacgacttcaaccacaaggtggcgatgagagactatggatttgttagtgctgggcatgtagcttcttctgttcccaagtgcattcacaagactccttttaatcaaaagctggttttcaaaaaaacataagaagtatttaaaaacttcatttctgggctagagaagccatcgtaatcatcattatcatcaaaaattcatatttcggtggtggctgaaaagacagatgtctccatccacaggatgtcaatgaaagtaggagctactgacatgataatgtagcattagcctccaaggcctcatgattcagggtgtaattgcatttatttattgctgtttttcggtgagggtttgatggcagagttcctgaatccatctttgcttttcttttacagaacgcaatattcattataacatgtcttcttttaatgaatcagtcggtcttggctacttgaagacacatgcaattgaatttgtcaagtatccttatgtatcaagtggaatgagtggttgactcacgttggtttggcaagagcctctgaaatagataaatggctaatatctcattctggtggtggagttcataaaatgatatgtgggaaagaccatggcagctgtgacaatctgcccaaatgaaaattgtttttataatccacacagtgaactgtgatcttaagcatcatttgtaaatgtgaaatctgctctgtgctgtctacttgtttgtcattgttggcctagacctttgttgttttagctctttgttgtttatttttctctgctgtaggactctttttttctgttttccttaataagttacagttataacaaacggcaaatgagtcgcatttaccccaagggaggccgagtcgattccagtaattacatgcctcagattttctggaacgctggctgccagatggtttcactgaactatcaaaccccaggtaggagctgatgtccagtgaccccaaattccatgagaacactttgacaggatggtgccagcacttcccatcagttggctgtgggcattttttaaaggaagcagacatatggcaaagcaatgtgttattggatttatataatggtgagaaataaaaaaaaaaaaaccaaaatagagcaaacaatggtagaagataatgtgttgtgattggaatttaattcctttcataaatgccatgactattcctgctaaccattatcccatattccaaaatatttctcatttttcttccttttggatcaaagttgttatctttgtttccagaggcagaattaagtgaaaagaatttgagtatctttgtacagtaacagcgactcatttctcctttggcaaacaccctgaccactgtgaacattcagcaaatatgactgatgcaggggcacttcactaaacaaatacagaatattttgaagtaaatgccactaaaatggtatataaggagttacatatttgaagaggtactaatctataacttggtcctccaaagtgtactcaaagtcaggtttccaatatataatgactttttttttctggaaggaaaagagtaaatttttataattgataaacacatttttaaaatttttgaggtttgcttaagagcctaggatcacagtatcaagactagaggtagcaaaatagaaatagaatagatagaaatatgccacaaaccctcttcactgtagatggtcaattctacagcatggttcttacaactggtaaaataaaacaaaaccagaaagctcttttttccttcaactctttgctattaagagaactgcccatgcttcccaatttgaggattttttaaaatctattttgtattttaagaatccctgtcacttcgttccctgctatgtggattgagtggaagatcctttgactttcattcctttggcatgagtgtgagctgactgtgcttctcatgccttgaaggagcctccccagtgaccagaagctcctcctactggagtcaccattctgcatggggtccccacagtgcttgctaggttagactgtgacgtgatagctaccaatacaatcctgagtgtttctagctggggcccagtaacaaggctctgatgacttcacttacttaaaaaagcccaacttgtgttctcagttgtcagtgagtccataatatggattaaatggctaacccagcttatgttttattctataatattaggtttaaacacaacattttgaagaggaaaaaatatccatcagtttacccatttcttttgcggatgggaagaaagaaaaaatgttattcacttgcaagacagaagtcaaaagccatgtgctgccagtgtagaccccactagagtaattccccctgcctcccatcctggaagcatgccaccaagttttatgcgatacttacctagttcattttccagtcttttaaatcaagtttcatattcaccctcccgggtatctccagggttcctctgcccagggatcctgagacccatcctctcccactgtagcaggttggatatctctactctcaatactcatcaaacaatggtgtgactcctatattgaatccagttttaaaagtgacctttagcatgatctttatgaaaacacattttatgtttaatttaaatgaaacatgaggtcaattcaacatggaagagagtatgccttaaatagaccaagcagaaccttgtagtattaaagagggacctgtgggcctaggagcaatctgatacctattgtttcaaatcaccccgtcagggtcttttttgtctaggaagacaagatgctaaattatttttgtctcttgacagatttagcgatgcaattgaatcagggaaaatttgagtataatggatcgtgcgggtgagtaatatgatttaaactgttttcacctagattgagaactccatactacagctctaatgaagccatgtcattttcaattaggggctacagaatttaagctgggtttgagggatggaatagaaagaaatgaaatacctagagaatatttgcacatatacattcttcatctaccccattttactaagcaggttttgggttttttaaatcacaagtgaagcagttcatacatatgctacagtttaatcctctcactttaaaatcaatagtggaggattttatgtctgggacaggtaataatccctgcacacttggacattaactggagatgtaggcattaaatatgtgcattttacctaggacaaatcaaataatgaagttaatttcatatgtaatgaagttgtgggtgtcgagctgaatttcattcagttgggaataaacctttgtcctctactgattcttttttgtgtcttgtaagtagcagttatcaaagaataatgctgtgaatattgtcctagtttccttaaatagcactcttgaaaactgtgaaccaagaagtgaaataggaaatgttaattctacagaaacactgaaaggttaaatgaaaatataaaattagaattctcttgagataaaaaaaaaaaaacacaactatgtggtcatcccctcaccccacctcagcctcatgcatctgtccccaaacaagtaaatattaataactccagaccactgcccaaaggcctgtagaggaatccaatggaaaactatcccgtcataatgatgctattaggaatttcttcatggtggctcacctgattggatatctttttatcactgaacactgccagtcaagataacatttttcagtggttgtgagttaggaatgacttttcagcatgcactctgcctccctctgccagcctggtgaatggttctctgccaatgtggctgcaaacacagtgattatgctattccccaaatcacccaccacttacatacctggagcatgccctacattttcctctgctgtgtgctttggaagaaaataaattgtgtagctgggaagagaaagatctgaattcatatttcagaattttgtgaaagcaattttgttatttaatgccaagtgttccaacccaggagattttgcgcataaattgctttgtagacctcctcctctcccaagtagtgggccaaggcatcaagccccaggggttcagccctggactgtcagtaaaagccctaggctgggagtctaaagatcagggtttgagctcagctcccagctgctcctagttcttgctgtattgcctagagcaggtgtgttagacccagagcctctcttctctgcttgataaaatgaagacggtgacacctgtcgcacagggtttgttgtactcaaaggaaaaaaaatgtcttttttctagaacgaaacagggaactgaaaaagactttgtcctttgacaaaaaccgagtcctttctgatgagacccacctttgggcttccctctcagtcactgtagaatccagtctgagcaacaatcgtgctagttcagtttagtgaaaatccccagcccttggtatctgaccaccctggatatcctgtcactttggcctgccttcagcaataatcctatcaagtcagtttggccagaagtccttatccttgatgtttcctcatagtaattttccatctgctggcgctcaccttactccatggttctaaatctccatgtacgcttgttggggtaagggttgagcccttatacctatcaccatggctccctacccctttgaataaagtccactttaccatgtttaacaagtgtttgtgtacatttttttctttaacagtttacgacagctcagtcaggttgaatgagtgtacgaaagtacttcaggaactgcacatttctgtgcaaaagtgagatttaagaaaagcttaaggccttgtgatcaatcacacacacagacattgcaaaattcaatgagtgctctgttcagtcgtcctttaaggaccccaaggagtcagcctcagcactcctggctcttacaggacccgtcgggcatggctgtgctcacttctgaaaacttgcagtggcccggtgatgcttgaagcactttccttgcccacctcagcgatcacacctaagatgccatcagctgtctaacatgccatgaggaatcctggcagcctggccggatgcagggagtattgtttctgtataaaaaaaatcctgacggctcggcccagtggctcacacctggaatcccagcactttgggaggccgaggcgggcagtggctcacacctggaatcccagcactttgggaggccgaggcgggcagatcacaaggttaggagatcgagaccatcctggctaacacggcgaaatcccgtctctactaaaaatacaaaaaattagccgggcgtggtggcgggcacctgtagtcccagctacttgggaggctgaggcaggagaatgtcgtgaacctgggaggcagagcttacagtgagccaagatcgtgccactgcactccagcctgggtgacagagcaagactccatctcaaaaaaaaaaaaaaaaaaagtcctgacaatcctatgttgtttgtttttcctagaatttctgcttagccattattagcacgtgcagtgtctcactctctccaccgttatttattttttcttaagacagggtttcgctctgtcacccaggctcaagtgcagtggtgcaaacgtggctcattgaggccttgacatcctgggctcaatccatcctccctcctccacccctcaaatagctaggggtgcccaccaccacacatggctagtttttttatttgtacagatggggtttcaccatgttgcccagactggtctcgaactcttgagctcaggcaatctgcctgccttggcctcccaaagtgctgggattacaggcatgagctactatgcctgacctcactggtcatttgtaaatgcgttcatttattttaaaataccttcacagaaaaggatactgttgctactttagcctgaattctgtgctgatgtgttggacgctatgtgactgaaagcatacacctcaccagaaaagctgaaaaatagcctgtgcagtggggcagcccagcttgataaagtatcagcgatgctgttgactctgtaatctcctaattccccttcccatacacccagctggtggcaaaggctgtcagtgacagggaaaagagaagaaattgccgtcacctgcatgcctctgtgttccatggcgatggtagatgtggggcccggtgctgcacaggagctcctgtcactggtgctcgggcactgcatggttctcaccgtgtcacccttgtggttctcccacccacctgcaaagacttttaaaaactgcccctttgggctgagtctgaggactgcatttcttaaagaggcattctgtgccctttaggcctgtggaggcaaagaatccctgttttatatagaacatcagtgtgcaaagtacacaaacacccccaggatctagcaactgtagcaaaacgtcagataccctcctgggaaaaccctctgtgctccctggctgatcttgtgggaggacgcaccactgggcccaataagtgtgaatgttaccaggaaagtgagcagtgcttttaacagtctcgtttttgaagatggaaaaatggaagacatttccctaattgcaaatgaaacaaaatagtgtaaattaatacctaaaatctttttagactttcataggaaagtgagtgattgatatcaaaatggtatgacattttatgattcagaggctgttttttatacagcatttctcccttgcccacaggccgtacgttctaagaaccccagtggatgcctgaaaccaccaaacccaacatgtattatatatattgtggttctacacattgcatacctgtgataaagtttaatttataaattaggcatagtaagagattaacatcaatgactaataatggaacagttataacaatatagtgtaataaaagttaggtgaatgtggtctcaaaatatcttaattttttctcttttatgtttattggctatttggatattctgttttgtgaagaacttctactcattttcctattgggttttctatcttttaaaatagattttttatttcaaatttttattttccaatttttatattaggttctattttaatatttttggaacagagttgaccaggggtagctgaagcctcagaaagcaaaattgcaaataaagggggatactgtatagcatagcaacttgcagttatcatcagcagccattttgctttcttgcagctaaataaaataatggcatgttggacaactgatggcatcttaggtatgatgaaataggatgcatttccttatgaccccattttctcattcttggtgctcctatccacccacctggttagcaacccttcttctctccctcgcttgccttccaaggccttacacagtccacagaaaatccttggatccctgtcttggcattggctttggccttgtgcctgtgcctaccgcacagacctagatgtctggaatgagttcattttctgtaccagaaagcaccaaacagaccatctatgtcatttgcagggcccaatgcagaatgaaaatgaagggctcctgagaatttaggatggtggatgcagagcattaaaccaagcatggggcccttctgagttcagggccctgtagaactgcacaattagcacatccacatagccagctctggtgccagattctggcttcagcttccctatcaatgccccagccccctgcaccctcacagccaccagggatatgagaggcaacctctgctgctctctcagaccgccttggacccagaacagatgctcctttgaccttcaaagaaagcttgctaagtgtcctatcccaggccagggcttatctcatggtcctgacaagcttctgcatactctgttttactctcttcaagtatacaaaatgaacccatttcaccggagcatgcctgctttggagaattggatatgggtttcttgcccctttcccctgccatttctcattttggatcaattcactccttcagagatgagtgttctatgcagatttgaaaggggggatgtggaagaatgcttttgaccctgagatgtcattgtgatcccgtttcttattttggtgggtaggaagggctcttgatctttaacaaaggactgtggaaagtgaggaatctctggacactcacttcccaaggagattcagaactggaaaggtgactccagtcctgtattcatccaagtcccgaccttcctcgggaggcagaatccctcatttgccacagctggggtccaaatgctgcctgtgtcatgaaagccagacccaccattgttacctcccctcacagtctgtgtcggttttccttccagagaaagctggtgggcttccctcggagatgcaggcgtagtattgtagctactcacctactttccatcctgattctttaccttttgctgtatcatcatattttctagttgccaactctagccacaaaaaaagctgcaaatctaaaattccatgaatacagaagataatctcttctatatagagagcttttatattaatattgtgggttgcattctcttggagacaagagtgttcaaaattaccttcaacatttcaacaattgtgtaaatgtctatattcttgataaaaaatcagtgttgtctcttaaagattcctttttggactatcaaatgtaagggaatatttttaacactttgttttttgttcagtcttagaagataacaatgaatggtgactttttcaaaactaagaaaagtgacattaaactttaaagaaaaaatatcatgactcaggatcccttttgggttgtattttaacagataataaagttgacatcatctagacttgaaattaataaaagttatgcttctaagaaaaattagagatttgagttcccataattttgattcttttacatttaaaagcaaacctttacttttggaaaaaagtacttttattttcattgatgtactgctcatagtatggattctttaaatctatggttatacttatttctaataattttttaattttttttaagttttttgacacaagtttcagggaaattatggaatctgtgattatatgaccactaccccgtggacatgaggggcagacattgtgtagtgagggtaattgcagaacattttcatcgcctcaaaatctgtatcgtttagctttcatctcccaataggaattttaatctaccctctgtctctatatttgcctattctgaacatttgatataaatgaatttatataacatatggcctttcgtgcctggcttctttcacttaacataatgttttcaaggttcatccaggttgtaatgtgtatcaatactttattatttttattgctgaataattttccattgtatggatataccatgttttgtgccatacattcattcatcgatggacatttgggtaatttccatctctggattattacaaataatgctgctatgaatgttcatatgcaagttcttctatgaatatgtctttccatttatcttggttacatgcataagaatggaattgctgggtcatatggtaactctatgtttaactctttgaggaactgccagactgtctttctaagtgaatgcatcattttacactcctactagcaacatatgagagttccaatttctccacatccttgtcaacacttattgttatctgactcattaattacagtcatcctagtgtatacatagtgatatctcattgtggttttgatattcatttctctgatgactaatgatgttagacatctttttatgtgcttcttggttttttgtatatcttatttggagaaatgtctgttcagatcatttgaccattatttagatgagttattctttatgtattctagatacaggcctctaatcagatatatgaattgcaaattttttcctttttgtgactagtctttttactttcttcatagtgtcttttgaagcataaaagttttcaacagaaaatccagtgtatcattgcatgtgcttttggtatcatgtttagaatccattgccaaattcaggtcataaagatttgtccttatggcttcttttaggaattttgtagtttggctcttgcatttagttattttatcctctttgagctaatttttgtatatggtataaggtaaagatccagttttatttatttatctatttatttgcatggaactatcctattatcctgtcactatttatttaaaagactattctttcacccattgattggtcttggcatccttgtcaaaaatcaattggccatagataacgtggatttatttatagactttgattctgtctcaatgagttatgtgtttttctttatgtcagtaccagactgtcttgattaaatcttgtagcttagtaataagttttgaaatcaagaagtgtgagacacccaattttgttctctcttttaacattgttttggctattcttgatcccttgagtttctatatgaattttaggattagcttgtcagtttctaccaaaaagtcagctgggattttgatagagattacactgaattcacacatcaatttgagaaatacttccagcttaacaatatggtcttccaacccatgaaggcaagatgtcttcccatttatttagctcttctttaatttttttaaacagtgttttgtagttttcaaattgtagacacttattttttttaaaaaagtttattcctaagtggtttatattttgctgttgttatagaattgttttcttaatttcatttttgcatgttcattgtcattgtatagaaatacaattgactttttatatgtttatctggtatcctgcaatagtggtgaatttatttattccaatagtttttttagtggattccttagagtttttttttatttatgggatcatgtcatctgtgactagaaataggcttacttccttctttccaatctggatgccttttaatttgttttcttgcctgattgtttctactagaaatggagaaataatttatttttattttcacctacctctagctgaaatgtcaattacctttgattgtgaatgtagacaacaatccacagtcacattagtggtacccgtgactctctcaccaatgtaaatcacagacattgtcatatttcactactattgttacagctgtctcaaaatatttttgtactttagattattgtcatcataattagatcttaccattagatcttataatttaatgcattattacaagtacaattaatacagaggtagaatatcacatatttttatattttgataactatagctaatataattggtttttcattgttattctttgcattttattttatacatataaagaaaagtatttaaaggtgaccaggggataaaaaagttccagagaagatgataggatcaggaagtcctggataccactgaggctgcagctctttaaggttgtgcataagggcgggcacattctcttccatccttaggaccctctgcctaaaatcctagctcctgtgttacagatggagaaaaggaagcatccattgtttcaactagcgagtgttttagtctttgtaaaacctactaataaacttctatgctattgtcctaccaggtaccttctcaaaccagatttcatgaggcggcctgatcgaacatttgaccccttctctgaaactcctgttgatggtgttattgcagccacttgctcagtgcaggtaaggcccctgctcatcacaaggtagtataaatgtatacacaagtggtccttgaaagaaattataaaatattgaatgttaaattgcaagatccatgtgctgctcacaactttgacttaagattccaccccctttttaaaaaatgagacccattttttcactagtaaaattattagctacttaaagtgaaagataccatcaaaaaagtacctgctacttgattccatttatacaaaattctagaaaatgcaaattatagtgacagacagtaaatcagtgatggcctttgaaaaaagggcagggaggaatgggttacaaaagggcacaaagaaacttcaggtgatgatacaaatgtttatcatcttaattatggaggtggtttcgcagatgtgctcatatgtcccaactgatctaattttacattttttttttgttttttattttttgacactgagtatcactctgtcgcccaggcaggagtgcagtggcacaatctcggctcactgcaacctcctcctcccggtttcaagtgattctcctgcacctgtagctgggattacaggtgcccaccgccacacctggctaatttttatatttttagtagagatgggtttttaccatgttggccaggctgttctcaaactcctaacctcaggtgatctacctgcctcagcctcccaaagtactggcattacagggatgagccaccgtgcctagcctaattgtacattttaaatgcatataatttattgtatgtcaaatatacctcaaaaaagctgtttcagattgttagctagaaaataatgtaaacaaaaaaccctaataagtggctatagtcatttaaacactaaatgaaaaatcatctctccatagctttatcgtagatagactaacattataaaactgtcctagctgaccagtgtcaatatcagtaatgacagacaaattctagcttcacttttctgtgtgtctcttttcaagacttctaaaagaattcattaataagtatggcatgatggaatttcagagctatgaagggtcttaggacatacctgaattcatcacttcatttcataggtgtagacacttaggtgagatgaagaggccgtggacactatttgtattatgattcatatatattttttctttgttttttttctagacagttctagaaggtagaacatctgcttgaaacagctggggtttttttgcctatagtagttgttcgataatgttttggtttgatagaaatgaatacattattgccatagataattgaaattcctgctcccacccaaaagacagaatttcttacttcctgattattttttgctactgatgcttacacagagcttacttctctttgctctcgttcgtgctgctacaggttatatcaggtcaattcttatcagataagaaaattggcacctacgtagaggtggatatgtatgggttgcccactgacaccatacgtaaggaattccgaactcgcatggttatgaataatggactcaatccagtttacaatgaagagtcatttgtatttcggaaggtaggacattttcagcacgtcaaacttactctaataacttgggagccatgttttagttcacagacgctacacgatacaggggcacttattcaaccgacaacatcttctttttctcttctcctaatggctaacttctgtagctgtcataggatcattggttctatttggccctgcctccttttggttctcctctcctccttggaagagcccatctcctgcacagcagtgcctcagctctgggtttaccatcttttagaatgagtccttgctggtggacaccatcgtacactagagagttcttccctaccctggaagttactggtaacttacactattcctttagccaagtagtcaggtaagatgctgcactccaaaattttggtcaatagatgtcactacatgggtcagttggcatggtcctgtctctcctgaaagagtgacacctgttgcctacttgcaggtcttatccttcttgtactgttgttagtgttttatttttttctcctaataccgtatgttggatcctaaaaacaatcacagccattctctctaacgttcggttgttaatctcttattcaccttttcccttggtttattttttgtctattgaagatgcagtggaaaatccgcacaccggcagtgctgtctccaagaatgttcactttcctttcttacttactctgttgtcctgaccacaatgatttcttgctgcttctttaggcacaagttttccagctggttctgctccatttgtacatcatgcaacacagataatcagcttctttccttaacaaaatagggattatccatttcagaatagagtaactggcttacagaaaccaaatgaagggagatcaatgtaggtttgatgaaacaggccattttgacatttaagtttacgctgggatccacacaatcttcgcatcccattgtcttcttctctgcccctgtcaggatatggtgtaaattacatgcatagctgtgatttggttttttccttccctggtatttccaatttgttatagctggatccgttaccagtatggctagtgttctttggcatagtgaataatccctactcacatttctagaagctgagaaagttgactcaggcattctttgttttggatgaatgagaaaatacccagcttagtgtttatatataatagttctggcactagaaacgagatgccaattctgagtccttctctgttcttcagaagttaaatcgtttttttcattgctagcaagtgctttaaaaactttgttttctttcttgtcatttttgtatttttcactaatctcacatggcaagaatggcaaatcccaagcctctattcactgcataaggagcaagagagagggaaattggctaagttaccatggtttctcctcttcatcttcattaagctggaattaaattatagccttcagatgtaaataggcaaccagtccattgtctagctttaaacatagcactcagatcaagcaagatgtcctggttgcttttagccaataaaaaggcattcctgattaaacacattggataccctttttgtaatgttgctattttgtaactgaatcaggtttctgctatctgaactcagattttatgttcatttattccgtttggggatagcaggagtaggtgtcttagaatcaaagtatgttaatgtttctagctaccgcatcttactctatttaacatcccaacatttgctggaaactgaggagtacaagaaacaaggaggacccaaatttatgtacaaaagttatctcttatgcatgaagcatttattcagagatacttaatttatttattcagagatactttatttattcagagatactttcgtattcttaaaaacaaacaaatatagatgtcagcaatatgccagatattagatcacaggattagatccccaattcccaggccccactctgtcactgatatgtctaagatcaaggaaagtggctttatttctcatccattatatgggtggggacaaggatcaatcacaagggttgaagtggtaatctttaacattcatttcatctaacatttttcacgagataatttccaggaaacatgttccaattgcttttctcagtgtcttgggcactgtagctcatgcagtacattttggggaatgcagatggatcatggacttactttcaacatcagggaacatttaagaacagcatggatttggtccacactccttagagtcatggttcttgggcgctgcattggaaaaatcagtgaaagtcctgttctgtttgcaggtgatcctgccggacctggctgtcttgagaatagctgtgtatgatgataacaacaagctgattggccagaggatcctcccgcttgatggcctccaagccggatatcgacacatttcccttcgaaatgagggaaataaaccattatcactaccaacaattttctgcaatattgttcttaaaacatatgtgcctgatggatttggaggtaagataaacatttgggtacggaatatgatatagatgaggtcctagattataagattataaaacatcttgtccatgctttaaaaaacaataaaaatactgtctattcctgctaatgctgccaaccctgattaccttgaatacatcaagaatacatcataacctcaggtttcatagtaagaaatgaaagtacaaaacgagatgatctctaaagtcctttcttattttaaaatactataattttatgttgtttatcaatttttacaaacacattttgtgaagggtatatttatattgacaatcagactagggaaaaaaacataaataaggtgaaaccatagatatcttatcaatagtatcgctaaaagatttaaattgaactcagctatcaacatgcctgaattttcttccaaatccacaagaaagttcaatttcataaaaaatcctagtcatcaatccatatgctttaaggtaatcaatgggaggaatccaaagctagattaagtcatagaattttgcttacatgcaaacatgttaactttttatggcctccatctaagccaatacattaaaagaaagcaaagatcctctatattgtcagcctgttgaaccataaggaaatagtacagcaggatgatggcatccgattagccaagggttcaaatccttactctccactgctggcagggtgatcttgggaagaggatgtaacctctcaaacccctcatttcctcccctgcaaagtgaagataataataactacctccctcatagcattattgtgaggtgcttatcattagagtacatgatatagcaaggctcagaaatgtatgagcgcatgggggtgggcggggtgtctgtagacacagatataatttctatacttcactggaacacatcactattttatctggggaatatgggataattttgctgtttgtttttagtagtgcatgcttctgtggagggcagattttctgcaactaaaccacaactttaccagtctaatatcagagtcaaaaattaaaataagccatgaggatttttccatcccaaaattcatagtccaggctccttcctccttctcctttgtctttcataaaaaaaaaaaaggaagcacattagaagctacaacatacagtaatagaggtaacaacccataaaaagcctggaaagggatgctgtgaggctgggtaagaggatcagaaaggggcactggagacaagtggtaggtttaggagcagcagtccgtggcaaacctcagaaacctccctgcaacacagcatggtggtggccatggggcatcagctgatgagttaaatcatactccacatacgtgagcttagaaagcaggaactgtggaatacctcatacattttagaaatagttgtataaacccatatgatggaagatttagaagttttgcctctgcatgggttaacttcccactgaaactctaattcattcttgggaactaagccactcgaatagaaaagggaaagaaatcatttgtttagcttctactttatgccaagagctttatgtaaagagatccaaaagcatgaagttgttcagaatggatgtaagcatagggagatctgtgctgcagaaacatctgtatttacaatgtagcttattacccatgttgtatttaagtatttagccaaattaatctctttaatattagtcctgccagtattctttcctaacatgtcattgtggctgcttactttttatcagaagcgtttgaaatttctatgtaccattgatgagattctgcagtcgatgccttaaccagagttgacattcaaatacaatttattcaaaattctctggtcatttattttatatgtgaagaaaccagggacagacattatgcggtgtcagggacttccctgtagataacagaagaagaatatgagaactgtctttttccaaatctctgatcttctttatagcttcttgacttattcaaaatatacttatattttccctgtttagccaacctcccacattcatatctcagtgtgtttatgtgctgaaccagtgagataggaaatctatagagtctgtgttccctggagtattgatattccctcttcattccacaggaacaagttcaagatgaagctcagcaccatcacactcagcattttctagaaaaaaaaatgttttttttcccctaggaaaaaaaagaaactcatcaatatacatcattagatttatatttagctaaagaaagatagtgtggattttcattacttttttccacaaatatgcatagcaggtttattctataaaaagttaagtagctaaaatatgtatcagagagcaattctgagaacacagaggatcaaatgagggtcactcacaaatctgctgcccagagacagctattgtttacttccagtctctttttttcctgtttgtttatttatttatttgagacggagttttgctcttgtcacccaggctggagtgcagtgacacaatctcggctcactgcaacctccatctcccatgttcaggcgattctcctgtctcagcctcccgatagctagaactacaggcgtgcaccactatgcccagctaattttgtgtttttagtagagacggggtttcaccatgttggccaggctgatcttgaacttctgacctcaggtgatccacttgccttggcctcccaaagtgctgggattacagacgtgagccactgtgcctggccttttctgttttatttttaataaaattaaatcttactatactgctaatttggaattctaatttttttttagaatatgtttccatgtcatgaaatatttttatatttttattagctgtataggattacattttatgtcggccataatttagttatggataaacactgaagttttcttccttggccgctgaggaaacagagttaggaatttgagtgcaactccttctgcttctccttctcatttctatagcataaaaactctcaaaactggccaggcgcggtggctcatgcctgtaatcccagcactttgggaggccgaggcgcgtggatcacatgaggccaagaattcaagaccagcctggccaacatggcaaaacactgtctctactaaaaatgcaaaaattagcctgccatggtagcacacgcctgtaatcccagctactctgcaggctgaggcacaagaattgattgtacctgggaggcagaggttgaagtgagccgagttcatgccaccgcactccagcctggttgacagagcaagactctgtctccaaaaacaacaacaacaacaaaataactcccaaaagacacaaagaaataacagagcagtgatggctaccatgagttctgaacccttcctggctgtttctaagcagcccagatgcaaaatgtccaacaatacagtctcctatcagaaaaaaaaaaaaagtaacatttaggacagatgattaggaatgaatcatgaaaacttggcttaattttttcaatattattttgctacaaaacgtaaagaaaaacaaccctgtcttttactccctctgtcatacacaaatagaagtactagattgggtgctaggagcattcttcctttgtcaaatccaatgagactccgagtgctgggattatctttgctgctttatctgtgggtgccaacgccaccgtagatggcatttgcccattgcaaggctttatcagtgttagacactgctgtaggagacaggaagcagttccagggctaatggcaatgaaacgagggtcagtatttctttttcacccactgttgctttgggtgggttttatcacttgtgtttattttattattactgagtgatagggaggggagcaaataagagagttgatgctttgcttccgaaatctatggagcctcagcattgtattgaaatgtcactccccgctgtgtttcatgagcctcccagcgctttgttcctcgggcagtgctgatcattacttctgcaaccataaattttgcctcctcttctacaactattttatgtcagggaagatgaagtgaccctctatttctttgtacatttcccctttccaccttccctatgattaaaaatacatcttgggtctctgcccagggttttcatagggttgctttccaaccatttttacaaagatagttgactgtttcttatatcagatatttccagagaaagaatgttcttaattaagatgccattcctgggaaataatctcaggacttcctgatgcagtttaaacttgttccatctgtcctcttccttaagggtgctaaaatgtcatattttattaaatatttgttgaaaaacccagttgcatattcacagtgatatctttcttgtggccttttctgtactacagaaaatattagtcagacttcaagaagaaaagctctggaggggaagggggcaggatggattatggtaaaatactttggaaattgctagactaagcaaatttaaacaggcttatctattgcatggctcctgggatgtatggtgaatgcccaaggggagggggagaacatgagcatttcccaatcttatttgacacaggatcttgttgcccaagcacctactgtattttctaccattctaggaaatgcagtttgagaaatgcttaatcttttggtaggaacccaaaggactaagacaaaatcatagacttgggatttgcctttctttatcagcaccacattgcagctgataggggaaaaggatttttcttctgcctgtacctcttggtaagttaggaatagtagaggggaacgggagggaacctgggccaggagtgagcacataggggtggggagggggagtgtaggtgccatgggcagtgctcaccactgaggcactcaatgatttgaaaagcattggttaaacaaacgaaaatcaactgagttctcctgaaaagccaataagcatctggaagtctgtactaaggaattgctatcttcatttccattcttagagacacctacattgatgctttcaactctatatgaaagtcaggaagcatggcagggaggaagggaggggaaaagcagggcctacatggagagtctttactaggagagaccagcttcatggaaatgacattatgcccagaaatagatggtgtttttaaaaatacacataagtagagctttaagttaaatcttaatgaaagaaccaaatcagaaaaagcagactggtttcttttaaaaagagaggttccggagcccctgctgtggcctccaagaatctagggtgttttaggccacctacatgggttctgcagagtcaggagtttgcatgcatccatctctaccctgttagatgtacaatgtggctccccccagcaaggcctactcacctgccagtggatgccgatcagcactggaaatgaattcttgccacagtgatttatcctgtggaaccctaaactaaatgggaaataggcagccacagtattccccaataaaaggaaggaagcccagtgaaatgtcatattggcaccaaagaaagatactgggtttacttgaatatgcaaaactttggccaagaatataccagatttatttaaccacttcctcaagttatttttctgggctgaggcaaggaaaaaataaataccatttttcaagtacagttacacaagtaggtaagtatgagatatttgaggtagagcttttcattctctgattacagattattttaaatgtggctattaaaaatcaatttccttttttgatatgcagcactcttcgtatctacctatccatatgtctcacatatatatgcctctggccagtggagaaactgaattacaatgaaaaattatcttaaagatgccaaggcaggccttggctccctaatgctgagccctttgcactttggcagagaatttttgtcagaactgtcccaggtattcaaatgccattcttctgcattgttctataactccagctacagaatgaacacctgccaccacatgacccaattagacatcctagaaaggggtatccaatcttttggcttccttgggccacattggaagaataagaattgtcttgagccacaaataaaatatactaacactaacgatagctgatgagctataaaaataaataaataaataaataaaatttaaaaaataaaaataaaaaaagtttgtgcataattctcatgttttaggaaagtttacaaattcgtgttgggccacattcaaagccatcctgggccacatgtggcctgtgggccatgggttgggcatgcttatcctagaagtatctagtttgttatatgaaattgctaggaatgaagcatccatttcaaatagcctgctaactttagccttgctcaaggcatttagtccttttgtaatctcttttttgtcttatctgatttaatttgaacaaaccttactttacacttttcatatttttgttgcattttgttcaagaacattatattgcattattattgtatattgtaatttcttaaaggtaaaggcagcctctaactgcaaataaaacatctcaaataagacgtttcaaaaaataagaccaaataaggcagcatgttaggatctggcatcatatgtccctaatagtgtctagatttgttaatattggtaattcaagatagagttaagtaatgatatttatccagctaatggataaatcttcagcaggctccgattttgttgtatcatttaggtgacatctacataatccgatagcagatggctgatgagagcatctcagatagcttgcctgtgacaaacaagacaatatgtggattcagctaggtcaggattgtgtagaatcagccctagaagctgagaccaagacattgctgcataaacaggaggaaaaccactggtattctagcaggaggtctccaggggctgctggaccctccatagtcttaatgataaagcctgccttgtacacttaagcacatgactttttatggaagatgcatacccaagaatttaagtagtgaatttttttcccctcaattactgttggcaatcgaatgtacagttgtcttgttctccctctgccctagtttcctagaactactgtaacaaataaccacagactgggtggtttaaaacagcagagatttatggaggctagaagcctgagactaagtggtgggcagggccatgccctctctgaaggctctcgggaagaatccttccttgcctctttctggcttctggtggcttcagacagtccttggcattccttggcttgaagatgcaccactccagtctctgcctctgttgtcacatggccttcttccctgtgactccatgttctctcccttcttatagcgacactagtgattggatttagggcccaccctgatctagtaggatctcatttcagtcctcttctaaaacctaagcaaagaccctgtttataaataacatcacgttctgaagttctaggtagacaggagttttggtggacactattcaacctactccaccctcttaattctgcttttaatttttattttttattctttatgagacagagtcttgctctgtcgcccaggctgcagtgcagtggcatgatctcagcttactgcaacctccacttgccaggttcaagcaattctcctgcctcagcctcccgagtagctgggattacaggtgtgcaccaccacacggggccaatttgtgtgtgtgtgtgtttgtgtgtgtgtgtgtgtgtgtgtgtgtgtgtgtatttttagtaaagataggatttcaccatgttgaccaggctgatcttaaattcttgacctcaaatgatccacccacctcagcctcccaaagtactgggattacaggcatgagccaccgtgaccggcctccgctttattttcttagtactccttccattcatcattcttcaataactattttaaagcttattaagaataaattttgttaggaatgcctatcaggcatatgagttatataaagtgctatattatttaactaaaccattaactttctgataaaatgacaaagaaatcattttttgcactaagatattcctaaattcatctttttatagaaaagttgaaagcccatctaagtatctaccagtggggaatagtttgatatagaaaatcaatgtgacatttcccatttactaaaaataattttcagaactatgccgatataatatatgcatcaatgaaaatgcaggttatataacttctaataaaccatggaaaatatgtattcatgtgcaaaaatgacacaaaaatatacaaaaatgcttggttaggatagatggatcatttaatatcttgctttattgattctttaatgtcttgctttattgattctgtaacttgttttaagtaattaaagtattatctgttattcctatggaaaagactaccagttactcctcaaaaatgccatatactctcttcaggcccccagactgattatatgttattaaaaattagcgagtatttgtttcctaaccacccagtcctgtgtgttatcactgaaatgtgccattgggattggatgcttggcaaaacatatctgaagtgagaatgtacagagaagcatagaccaagtatatctcctccaaagaagggcagaaaagtttaatggatacaagttaaacctcactctgcctcataatggtgtggacaagtggcaagaagaggcatttgggagtcaggcacaaagagttgtgctaaaagtctaggttggtcaaattgtgtcttcatgtgctgaaggaccttaatcatgcccacttcatggcatcctgatgacgatgagaaagccatgtggttctcctaacacagcatcacctcatggttgaccagtgaccacagggcagaaggatgctgagtagaaagacatgaattggcatcagaggagtcttctgaacattgcatttcctctctaagcaatggaggtagaccctgtgtctcctccagacactactgactgaagagagatgtcagcaccatcagcaccactaaaagtaatgttgggagccaaagtattgccatgagaatcaccgaattgttgtgaagagagatagcagcagtatgaatgcagagatcgagttgccacctcctgcaagcacctctaaaagtaatgttgggagccaaagtattgccatgagaatcaccgaattgctgtgaagagagatagcagcagtatgaatgcagagatggagttgccacctcctgcaagctgccacctcctgagcctacttgaggaacttagcgtcacaaatgggacaaccagcctttatgtccctcaatgtgatgcatataaagtcacagcacctcctagaagtatccttaaagaaagatgtcaagagggattgctttagactaaaattgacttaagagacataattatcagagacatagtgtgaaatctggtaccttgattcaagcaatgtaactataaataggggaaatattaagatgggctgtgtattatatcatagtaaagaattacgccaattttgttggatatagcattgggatggttggctccaaattaaatttagagctgcagagacaagttattaggaattaaatgttctgatatatggaattcaccttaaaatatttcaatagagaggaaagagaaaaaatgaaaggaatataaaggaaatgtggcaaacaaatgtttataattgttgggttatcatcataaatatatgaggggttattgtactgttctctccacttttgtgtatacttgaaatgttttgtaacaaagagtttaaaatatataaataaattcctagaatattaacttgccaaaaataattgtctgtgatttttttttcctgagcaagatttaagaactaatttttccacagctgttgttgagaggcaaagagttcttagggatcatgggtgataaaaacagaccttctcacatgccactggtgggagaataaattgatgcaatttcggtggagtgcaatttggcaataactaccataggacaaatactcttacccatcattctaacttctaagaatctattctgtaaatatatgtagaggtatgctacgaaatgttcaaagacattcactacaatactttaatagcaaagaactggaaggacaagctgtctaccaataggaactggttaaagaaattatcaccattcagagaatggaaagtttaagcaacccttataattaatgtattagagctatattgccaatatgagaatgtttcccaagatatttgacattaaaaaatggtgcagaaaactatgaacccatttggagttttaaaaaatatcagaaaggatacaagaaatggataataatagttaccttctgggcgtaggattggcaggagagaaagttttcacttttcattttatatatttgaatgtttaccatgtgcagatgttattttattttatttgtttattattatttttttctgagacggagtctcactctgtcacccagcctggagtacattggcacgatctctgctcactgcaacctccgcctcctgggttcaagtgactctcctgcctcagcttctcaagtagctgagattacaggcatgcgccaccaagcccagctaatttttgtatttttagtaaagacggggtttcaccatgttgcctaggctggtcttgaactcgtgacctcaggtgatccacccttctcgtgttcccaaagtactgggattaccggcgtgagctactgcgtccggccaaccatgtgcaaatgttattttctgttataaaaaggaaaagaaaaaaaaattgaaacctagagaattatgtgccccgtgtactgagaatgttatcttaagaattatcctaagattgtaattaggaaggcgattctgttagggaaaactttataaacttacacagtatttaaaatgtataaattatggatggtttcaagttaacaagaataattttgccttctatagtatgagtaaattgtgcacgattatatgaaactctgaaagtacttggaaatcttcaaatggcattaatataaaatattaaattctactatcttttaagttcaagttatacctgagaaaacactagagaaagatttcattttgtctaccatggaaccaaaattggctttgaatatgtattatccttctgtatcgaaaaataagacctacctgcctcaggtactttttgtgttcatcatctcattgaattatcatgattattctgcagggcaggtggtatccaccctaatttccagataaagaaactgaggctggggacattaatcaacttgctgaaagtcacacacaagtgaagaaacagtctagaacccacacacttcactcagtttgtcctgacactttgcctccttcatatcaggaaaaactttgtatcaggaaaaactaaataaaaaaatcatctggtctttggcccttgcttttaactcctttcttgttttctgcaactagctgtgccttcctcagtgtgtcttatgtcctaggaaaagattattaacagaaagcacaacaggtatccaggattgtagtttattaagcagagttttaatgaatattttcagtaaaacagagaattaacggctcattgggtttttttttcccctagatatcgtggatgctttatcagatccaaagaaatttctctcaattacagaaaagagagcagaccaaatgagagctatgggcattgaaactgtaagtagaaatggttgattaaaggtggccaagttgtgggagtttgattatcaaacagtgtttacaaaaacaagacaaagtaatgaattagcaaatttaaggagggtttttaaaactgagctcatcaattcaacaatagttaactttctacaaaagtgtggcatgtttaataaaatgtgactgccatcagaaaaatccacttcatcatcagtggcttaactcacatctggggaccccttccccattagaaagaaaatgcaaaacatttgttatacttttgggaaagtttaaaatgtaggtggagcatttctaatcagaaaaatgcaacatccgaaaagttccaaaattcaaaaccttttgagtgctgacattggatagtcatacctttgctttttgaagtttcactgtacataaactttctttcatgaacaaaattactaaaaatattgtataaaattaccttcaggctgtgtataagttgtatataaaacataaatgaattttctgtttagacttgggtcccatccccaggatacctcattatgtatatgtaaatgttccaaaatctgatatccaaaacatttctggtctcaagcatttcagataagggatattcaaactgtactgtacaggatgtttctatgatacactgaaataccagttaacctagttcagtgaattaatgataattgctttttatttttaattatttattttttaacagataggatctcgctctgtttcccaggctggagtgcagtagtgtgatcatagctgactataaacttaaacttctgggctcaagccatccttccacctcagcctcctcagcagttgggactacagatgcatgccactgtgcctggctaatttttttactttttttgtcaagacagggtctcactctgttgcctaggttggtgtcaaactcttggcctcaagcaatcctcccaccttgacctgccaaagcattgaaattactggcgtgagccaccatgcccagccaaaatggcgtttattattgatttttcactgtttgccagccttacatcccaaccttctcccattccagtgcacacgtggattgtttctttgtttttaaatgttctctttaccagactcctcagtttggaatggatgtagcatctctccaatagctagaaaaagagaaagtattctctgcttgttaagaagttggatcttctttccttggctggatcctttgcctttaagagagtagaagtctaggaagagtatggtagaagtttactggattcagtaaaataaagaatgtacaagatatttgaccttgagtgacattcatttgggtcaatgtaaatgtttctgttccagagtgacatagccgacgtgcccagtgacacttccaaaaatgacaagaaaggaaaggccaacaccgccaaagcaaatgtgacccctcagagtagctctgagctcagaccaaccaccacggctgccctggcctctggtgtggaagccaagaaaggtgagagagagccgttgggttccttatcttctgcacccaccttaattacacagtgtacaatatctatagctttaggaaatatataaattcgaagttctttgtgggaaagaaccttttacatagtgatgttaactaattcatccccactctcttccagaccctcccataggtagttacctggacaggccgtgggctcatgaaccaacatagttattcctattggacatttctaaattctcatactgataattttccctcataagtagaaacatgattatttgtttgtaaaattatcaaatgagcacttgaaggccaattccatgtgcttacctgtagatgaaacaaaagatcattaagaggtggcatcacaaagaatcacgtgtctcatattcagccagtatgtagggaaacaactgtgctggttattttaattggtttccatatgaattggccagacatccattgattggatggtgcccattccatactggagggaaagtgggcagggagaatgctgatagggagtggcaaggagttcatttttcttgttctggaaagaattctggggtcatcctgagaaggtcatgggaaatgagtcaaaggagtatttgaagaaaattatagtcttggcagaagaattcattgaaagtgggcatgctaagggcaaggtaagaattatgatactcatgcttctgttataacacacctatcacattgtgttaataaagtattaacaaccagagaaagaggtcattgcagatgagaccacacctcatcatcagtgtgtccctggaaccatgcctagttaaaatctagtagtctattttctcaggaagtaaagcgctgtttaatgaatgataggggcaaggaaatctagattaagttggaaattgtcaaaaggaaggaagaatagaaataagttggcagcttgaggccaggtgcagtggctcatgcctgtaatcccagcactttgagaggccgaagcgggcagatcatgaggtcaggagatcgagaccatcctggctaacatgttgaaaccccgtctctactaaaaatacaaaaaattagccaggcatggtggcgagcccctgtagtcccagctgctcaggaggctgaggcaggagaatggcgtgagcccgggaggcggagcttgcagtgagctgagatagcgccactgcagtccggcctgggtgaaagagggagactatatcttaaaaaaaaaaaaaaaaaagaaagaaagaaataagttggcagctttgatatgggccttaggcagaaaggggctttttggtaactcagacttcaaggacagatcccagagatagattgtaccattgagagaagtagaggagttaggaggaggagctgcttttggtaaggaagatgattttggttctgtatatcactgaggacaagctgttgctgatacatctgggcagaaatatgcaattaccaaatctatatcaggtggagaagaagaaggagggacagagaaacagaataagaatacttagaaggcagaatgaatggggaaaaaagagaaaagagagatctatgttctaagaagaattagttttgagaagatgctgtagacaagtccagagaagtgaagactacaaaattatagttgaaccaggggtgattggatgatgaaggtagaaacatggttaaaaaaatgtgagacataatttaagacataaaatggttgttctggaggacagtagcatgttggtaggaactaataaagaaaaacaaggaaaatgcaaaagagagtacatggtaaaacaaggctataaggaagatctgaatcaacagaaagggtgaaattcagctggataaggaaggaagagatatgttctgtctgagctaagaagaatgatgagtgaatagaagtttcaggatagacaggaagaattcttgacagacggtgtatcagtcagcttatgctgcataacaaatgacctcaaattttagtagcttaagacaaccaccatttattgagatcatgtttcattgggttggttggtctaagctggcttggctaatctctgtgtcttgcttatgcacctgtgatcagctgataggttgactggaaggtagatgtgggatgaccttatgcacacatctgtcatttggcaagttgtttcacattatcctgaagcctgagcaggcttgttcatatggtactccctgagtttaaagagcagcccttttccagcctctgctagtctcccattggctacagcaggtcacaaagtgaaccaatattcaaggggtagagaaatagactctacctcttgattagaggagaaagaaatagtggtcatttttgtagtataacacagatagattttatctgatctaagaagttggttaggtggctgctctctgctgagaaacgtagaggtagaactgaaaaacagcagtatagaaaagctttggagttgcccctggctggaatagaatgatccacaggaaataaggagaaggtctgccacatagcacacaggaccctggtgagggttggtggtgtgtactaagttgatgtagcttgatctcattacttcttcagcagtgcccagaaactcagcaacaactgtggacaaagtacagcttagggagttgcaagcctgaaattatcacaatttatatggtctgggaccaaaagtttgaagaccattaagttatgacactgtaacagttggctattgatgtgtaacaagcaatcacaaaagtcagtaatttaaataagtaagcatctattatagctcatgaggttgtctgggtggcttttctggttatgggaggattagtatcagtgactcagctgatcttagctatgcttattcaaatgtttggggttcagctaaagtgtcattggctgggacaagtgggctgtcttccttgtggactctcatctttcatcagcttagcctgggcttgttcacatggtagttgcagtgttctaaaatggaggtgaaagtacagatgctccttgacttatgacagagttacatcctcataagctgaacatatcattaagtcaaaaatgtgtttaatatctaagctaccgaacatcatagcttagcttagtctagcctattttaaatgtgctcagaacacctacattagtctacagttgggcaaaatcatctaacacaaagcctattttataataaagtgttaaatatttcgtgtaacttattaaatgcagtacagtgtagagtatacagctgattgggagctgaggcttgctgcagccccagcgcatatccctagcttaggaaaagatcaaaattcacaattcaacatatgctctctactgaatgcatatcacttttgcttcatcacaaagttgaaccactgtaagttgaaccatctgtatgtcaggttccttgatgagtcctagacttagaactggcatggcatcctttccactacattctgtcatcccaagcaagtcacatggcccagctcagattcaagagttggggaaacagattccacatattgatgggagaaattccaaagtcacatgtaagtaggtgtggaaacagggaggggtggaattttttggccatttttgcactcagtctgccaccctgatcataatatataggttaatgttccagtggggtagatactagaggagagagacttttctaggaaaggaaaaggttaaagggaaccaggaacaagatgaaagtaaaaagcttgcttggtaggtgtgagggagtgagtgaagttggcaggatggagattgcagtcagaaagaggttactctaagctacttgtcttggaggaagggcagtttcaagcagtgttaacatcccgtttacaactgtcagtgggaggtgaggtaaagtagagatgaagatttctagaatggaaggcatcatgaaaacagaaagaaaagtcactcagcacattcttctcatgcatattgaatcactgtgttggacgtctgggaatgcctgcataggaaaaccacaattcagatatgaagttcatggggccgggcagtgtgtgacctaaaaggacacatgtggaggtagttaggctcagcagagcctggtgtaagtgagaggtctgttcttttgtatgatagtttttaggagaatggcatggaagtacaagagagaagtctataggtgttcttcccacgcctctccatggattggggtggggtggggaataaactctactccaggagcctttgggggaagtgatgtcatttgagaaagcaagcctccatttctttccagaaaactgtcttaatttgagtcaccccaaagaccctgagagaaggcttccagtgcaagtagtttattctgggaggcagtggacatggatagagatgtgaagaagtgacaccagggagggaaggcagccagtaattagaatgttttaaagccagttgccagtaggcacctggaacttaatgccctggagaaactctgggggctggtattggacatacttctcagaggtctcctcttagagggatgagggagctggggaatgtataccctgactcctgtcagccttttcttgagggttcccgtggaagggataaattctcggcattcagacgctggcaattggaagtgaactagaagagctgatgtagagagggcatagtgtgtggctggagcagacggcatttgctgcagacctctatgaaggtggggaggtgtgaaattccaaactgtttttcttagacattcagccaaacagcaacaactgcaccaacacgacttttttttttttttctgattttaagaacaaaggattaagaacacccagctcctaacttccagattagcaattaagagaaaacaagttattgttaaggaactatgctgatatgaacaaaaactttatgtagtgaaacttcaattagctaaaacccaaaatgtgctgcctaacctactttcataccagggaagcctgtagacctgcacagtcctatatagtagccactaaccacatggggctaccactaaccacatagggctatttgaatttatttaacaattaacttaaaagttaaaccttgagttcctcattcacactagccacatttcaggtgctcaagagccacagatggctagaggccgtcagttggacagacccacgcatggaacattcccattattgtgcaaagctctatgaggaaggctgttcttggcacgcagatggaactgtcctcttctgtagagtgtggtttttttttttctaactaaatcacttatgggaatcaacatttttacaaattgtgtctttcccccaaaacacaaaaccaggtagttgagggaagtttatgtttttgtaggttccttttaatcaagacttagttgaaccaagacaaaaagaaaataaaaattgagagagagagtgtaagtttcatcagactgggtcaaactcagaatttgctagatctctggaggaccttgcatactccccaaatcctgtatgttcattttacagatgagagagctgaggcctaaagacagggagctctttgtgtgccaggagtcactcccttgccttaccctgcctcagtcactagagagacagcttgtgaaagccaacttaggagatcagtagagagccccatggaccctttataccccgatcataaaatgttacagatcacaaggctgatttccctcagccaaaactttccttctgcggcctgaccaccctatcattgaatgtgcacatcttaaaatgaataaaagggaaaaacaagagcctgggacttgatgcctatctttcttgaatatatcatacctagcctttgggattctaatggaaatcaattacagcacagagtacacattcattttgtttgcctaagatgaaaatctgcagtcaaacagaaactgtttgaggatctggctacaactgttgttgccatgacaacacctggcctagcatcactcagatagcaggatgacttagtgtattaccctagctcctcctggtatgctcctgttatacactggtttgattttattatttcctgtatgtttaaggcattgctgtgctcaatagcacattgcttaaatgctaagattgaatttggtaaaagggagaagccagaaaaaaatgttttattctttcacaatgactgaattgagaatagagttgggaattagttgactggcatgatatgccttgaaatacaaaggtaagaataaggataatagatacttttgtgcctgatcagctcccctttatgggttcactatcccatctcacagctcctatgaattttggctgattgggcatttcagctgcccttctccatagaattgccctgggaccatgagagttcccttgcctgaaaggttttgtgaaacctctgtagcactcagctgattgatccagggttacaaatgcccagcctctttttgccaaggtggaatgactcttgggtgccatttgtactgaagagctccctgcaggatcagactgaggctggatttctactggaaacacaccctaccttgttcctctgccctgctccacttctttcattcccttaggggtttctcctgagagtctgccctcaatcaatcacttgcacatgaatccccttctcaggctctgcttgtaggaaacctgacctaagttaagacattcaacatttcaattgtccagttaattgctttgtaataggaacttaagatgtttatattcatcatatgtaaagctgcttcaaagtctttcgatgagatttcgatatgtcagttctatattaccagttattctctctgatttttagtatacatagtgacttaattttttttgtttgtttaggtattgaacttatccctcaagtaaggatagaagacttaaagcagatgaaggtaaaattgcttgactattttgcaagcactcttgtattacacatattggtgacaccaatatatttttgtttctcaccaagtgtaatcattgtgattacaaaaagaaaaaacaaaaaacctatttttgattctatttttctcccaaaggcttacttgaagcatttaaagaaacagcagaaggagctaaattctttaaagaagaaacatgcaaaggtacagtgctctacagctactattttgtgttatgtatggatgaatcatttgtagccaaaaacactactttgaagctgataccagaccacttaacagtaataactcattctaactggttaacaatgaaattaaaaaatagaatcggtttgggagtgcttgtcacttgtttgtagtctgcatttctaacaattctttcaaatgcataacaaagcttcatccatttaaaaattgtttcactaggccgggcacagtggctcacgcctgtaatcccagcactttgggaggccaaggtgggtagaataggatgtcaggagtttgagaccagcctgaccaacatggtaaaacctgtctctactaaaaatacaaaaattagctgggtgtggtgacatacccctgtaatcccagctactcaggaggctgaggcaggagaatcgctttaacccgggaggcagaggttgcagtgagctgagatcgtgccattgcattccagtgtaggtgatagagtaagactccatctcaaaaaaaaagaaaaattatttcactaataacatgactatataaaatattgaagaccagctcacaattctagccactagttacctaaattgccaggtcactgtcacatagtttgccatacacactggtgcatggagggagatgctagcaatctgtcaacctcccactcacagcacctagagagagaacacttgtcactttttctcccttatgtaaatcttgcccagtagcctacttctgaaatagatttatttttgctttttacccataagaagtggtattttgacagtgattgtgaaaaattacaagagctagttgcaaattgtaagagaacagcaggaggtggccccaggaattctcctgtgggttgaaaaacgtcatggccctcaaacatcgtcacttccagactccctcacaggtaaagaagaaaaaggtagtacctctttccttcctaagaacatataataaccagctgctgctggtaggataatgtctgtcctcttttattaagggcaatgagagcaagagaaacttaatttataatttattaatttgaaagaacttctgagttcttttaaactaatcttgcattcctgtttctttattctctgacccaagcctcaaaccaaggcatgtccttcagaacttggcttgagtgatgtaccttttaatcattccacgtattgagatgccgagaacattgtctggaaccctgtcccctgtcatttctttaagagtttgtgctaacactgattttttgagaagtcatttctttaagagtttatcctaacactgattttttttagaagttaggcctaatcttatcctagtaatgttccctgtattacagaactgttgggctcaatggatttgctgatacagtcacttcacttcaaagactgtttctaagtttcatgaataattccattcagtgaaattccttacattgctcaatggggttattggagacagaacaatttaaagtaggggcttcaatgttgttggttattgacaacaggctgaactatggaaagccaacagaaaaagagtaagaatgagaaataagagagaaagcaccttaaatgactttaattatttggaatagagtggatgcccgtatgctgcagcactatctaacagatttttcttgcatttaaattggatctcttttattgagcagacacctcagtggcctttgggctagttggaaacataaagattttggcttcatttaatattttcttgaggcatggccagaaaatatgctgtggcgggtggtaataatagcagcaataatagcagctagaattcctgcatgctcagtaattctcagatgctgtgctcagcaccttatatgcattgtctcatttaagactctaccctgtaaggtaaattctatgtgagtctccatttatatgtgagggaattaggaattagtgaagttatctgatgtcccagagttaggaagcagcatagctgatatttgaaccaaaatcaagagtccagaatccatagtcttgcaccatactcctgtgtaggatatgggatgctcactaagtggacaagttccctcattgggtcaaatgcagtgacagcacatgggacattagggaaaatcactatcaactttgggcagtgttgatatactgctgattatcaggactgtgactaaggaaggatgcccctcaatttttagaacttaacctacatcagagttgtccattaactccctggagccatcatgcccggcccaagctaacttctaagatgaagaatataatgaatatttacttgcctaatatacaccgatgccagctctgttaacatattgtctttaggcgagacatggtggctcatgcatgtaatcccagcactttgggaggccaaggcaagcagatctcacctgaagtcaggagtttaagaccagcctggccaacatggcaaaaccctgtctctagtaaaaatacaaaagttagccaggcatggtggcaggtgcctgtaatcccagctacttgggaggctgaggcaggagaatcacttgaacccaggaggcggaggttgcagtgagctgagattgtgccactgcactccagcctgggtgacaagagcaagactctgtctcaaaaacaaaacagaacaaacaacaacaacaacaacaaaaacatgttgtctttaaaaccaaaaaatgaaaaactgtttaaggagaggggaacaatgtggtgaatctattaccattggacatacttcatgcctgatctccatatgacgtgtttatcctaacactgatttttctgtcagtcaacacttttaaagtggcaatactagcttgtacatattgatacttgcttaagcacatattcttaggtattctcataacagttatataaaggagtactataattatatgagttttgtatctgttagcttttgcagggtaacaaaccaccctaaaatgtagtgacttaaaacaatgaccatttatttggctcacaattttgtgcatcagtagttggagctgggtttagctggatggttcttctggtctcagctgtattcactcatgaatctgctgttactaccagtttggttggcagatgggggactggctgatttaggtcagcctctgttaaaccacttcctctctgctttatgtggtctcctgtcttccagcaggctagtccaggcttgttcacatggctggggtcctgagagaccaagcagatcaagcatagtttcttgtggccccagctcagaactaacacaccatcacttccacctcattttttggccaaagtaggtcctaagtctggccttatgaggtctctaccttttgacaggtgacaaagttacatcagaagtgggagtggatgcagaaagggaaataactgtggccatttttatagcctaccggctattcaacagattagcttattaatacttaaaaaaacacagcttcattaaatcatctagtttttaagtggtggagtcaggatttgaaccaaattcagcccggcttgagaactcagacttgtaaccactatactcagctgcctctgatgtttctcacactaatttttcttctcttcacacatctttttctttatggtctcactaacaggtttttaagagcaatcatgaacctatcagggcacaaatatcttgggttccttcaggactggtttttcaacataaggtcattgggccaagagctggaggctttacaaaaatatgtattcttatgcctatctgacacttagctatcatctctaagaaaagaatataggaaatacagaaatacattttagataaactcctctcctctgcatgctaaattttgaggactgtttttttaggaacattatgtagcactttttactatcttttgagcccttagtagaaaccccactaatcgcctgcaaagacacttatcaagcctccttaaagaaacagaggttttatcctcttgccacataatagtaagaattaattcctacatcctttctgtgaaaggacatctacagctcttttataatagttttcagccacccaacatggagctaaggcttaccaccccaaagccttatgtcataaaatgacctgctgatgaagaaatatgacctgggctgcactctccctactagtgtgcccctggcccaaacagcccttggtagctaagaacagggactattatttagtctatatccagcaactgtagggagatctcagctcttacatatcagcctagatcaagcttgtccaacctgcatgcagctcccaggccacatgcagcttaggatggctttgaatgcagcccaacacaaatttgtagactttcttaaaacatgagatttatgcacagactttttttttttttttctctcattggctatcattagtgtcagcgttttatgtgtggcccaagacaattctttttccaatgtggcccaaggaagccaaaagatttgccactgctggcctagataaataattctactttttagacttaaagagaagcagagaatctatgaactatatctcagcagtttaagaaataaatgtatggtcccaaggagagcttatttccaaacttgcaggttagctaccagatagaaaggaacagtggggtgagtgtgaggttctgccatttgcaaataggtgtgcaatttgctgttaggatattgagaagaaaagatgggggtaacgaccatttgcaccccagatggatataaaaatgctcattaaaatgtctatttttggaaaatggcaatgatcaactgcatttgaccctctgaatgtactggcaatcaaacttctacttgtctcatactttctagaaccacttcaattcgaaatggaaactagggtaatggtttttcaagtgtctattatatgagacacagaaaaaggagaattaattaacaataatcctcccccagcacatgactcattgggatccagagctgcagttactttcattaagagacaggcatgcttttcaattgtccaatgaggtcaattccttagagccaaaaatgtaaaacccaaagttggatacatatctccagtaacgtgttagaaggggaattacaattcaaatgcctatggggtccaagcaggaagtagctgagggaagttggacaggtgttgactccataaaagctgggagcactcatctctatccacaggccaagtcagtctgagctaccaccattggtgcctggagagtagatgggtcagtcgtgtcctcttaaaggagagtcaaaaaatcagaaagcttatctgaatttcctgatcttttactatcggcgtctaattcaacctctttttgaaactgcgtaggaaaaaacaaaacaaaatccaaaactaaaaactacatctgcaggcaggatacattccttaggccaccagtttgcagtatcaacattaaatgagtcaaatgaaatgcctgagaagcctactaaactctggcatttttagtaaagctactgatggaaaattttctctttgctatgcaagcaatttagccgacagcaccaagactgttgttaaactcatcaattttaattcatggtcagaccttagtaccagacctataacttagttttgcagtggaaaggggcagagacacagcagttgccctcagagtccgcctattggtaatctcagagttacatgctgagcaaacatgatttactccaatttttcagcaccctctgtggtgcgatcattcacgcccatagtcacatcagtcacaagaatgaattgcagcagcagttttccccaaaagaagctgaatttactcttaacttggataagaaacgtacacaaattcttctgaatgctatacatgtttttccccaaaatgtcccagttaagatttactttaagttaacacatttaattttggtactcttggcttgaatgaatgagaaatgtatgtctcttcaatagtgtttcatgatttaactaaggaccaaaagaataaaaccaataatggacattttttttaagctaagatggacttagagatcatttcatgcctccttcattttacagcacaatgagctgagacttgaccagagtcacatggaaatcagtaattaggatccccatttctttctgaaaggacaagtggtgtctgggaatcaagttatcccaaaacacttcagcaatcactgcctaccacacagggatggagttttgaataaaaagagaaacagagacaatttttcaggaccagctttcctgttactgacattaattatagtcactttaattcaatatgctttcagtttttcaaattatttttgcatatgtttagtaaccttgcatctcataagcaactcatgaattcggttaggcaaaggtacctaactcagttttcttttcttttcttttcttttttttttttttttttttgagatggagtcttgctctgtcatgcagtggcatgatctcgactcactgcaacctatgcctcccgggttcaagcaattctcgtccctcagcctccagagtagctgggattacaggagtgcaccaccatgcccggctaatttttgtatttttagtagagttgggtttttgccatgttagccaggctagtctcgaactcctgacctcaggtgatttatgcgcctcagcctcccaaagtcctgggattacaggcatgggctactgtgcccagccctaactcagttttctaataaagacattgaggcctgggaagatttatatatgttacacaagggcagttgtttaattattggctgagctgggaccagaatctaagtcctcttgctattttcctatgctgactttttattcatgcgataaatacttattgagcatatactttgtaccaggctttgtgccatgtactggtaaagagaaaagacctgccctgctcttgtagagcatattacatagagttgaatccatcataaacaactttgtggtacaaagagccctattcctcatatctaattggattaataaggttcaccaaaatattttcttaggaaaaaaatctgtgtcaatttacatccaagcctcaaagtctctacttgtcctgttctgcactaaaatatttaaagaaatagccttcaccctcctttcaatgatatttgcaagataatataggactgtggcacttctgatatattttgagacctgcagaaagccccttatttatttaattttttgcccaggaaaaattaacacatgggttagccaaccataatgatttctaaatcttagaaagaagactaggaggagggcattttagtaggtaccaaagtattacaagagtagttaaatacattcagggatacatcaacatgttcctctattcctggggcagtagatcaagcatggaggaaacatttattgatttaattagtctgattgatatccctatctcaagtcactctctgtgtgttatcatgggtattgaatagtatagataggtttgtatgtcactgtgttttgaataagctgtaacacacatttgatacattagattcacttttaatcctaacaaccctatgaagtaaatgtcactatcccaattataaagatgagcatactctggaaaggtaagtgactcaccccagcactgaaaaacccatgtccttaacccagtgccacattgcagaagctctggaggaaatgtgtttatagcacaaaggtgcacacacattggtaatatggctagatttatggggcattccaattacaaattaagcccagatccacagcaagcccacctagcctttgttcccactgtaagttcctatgttgggaatctccctatccagcatcacccttctccactccttctcctaaagacaagaatgctgaggccttgtgcatgaatgcgtttctaaagaatttatatataaatgaattgtagatcaagtcctgtgttaaatctcttagctgggaaattaaggaagtcttggtaaagacttaaaaattccttccccatttatattttatgaaaccgttaaaagaagttcatgaattagatttgcataaagtcaagcctaccttagaaagaaaataaatttgcttttaaattaaggcactattttcttcaataagtgaaaggaaatatgacggtgagaggggttatataacctgaacaacatgtacacccattccagtcatgaatagcatcccatttttctggttctcaagagtaaggttaggctataacatcaagtgtcatttagagttggaaatttctgattgtactgatttcctctgtgcttgggaggctgagcagctaaagaaatctgatttcatataagtcattggctgtagctaaatgcctttttcattgtccaggaagaaataatgtttatattgaaatacctactttccaaagcattgcagccccaatttcaatggttacgtgaagcagatgggaaaatgttttaaatatctgtaaaacagaaggccatagctcctgaacactttatcctcataaactgcttctagataagtaagccagtgaaaatattaagtgatgtagattcaaattcagctgatggtgacaaacacagtgatgcctctcattatataataatggcattcaagagctccaaaatgtgcaggtgtttagaaaccatgtcacatgatgaatagttacatttagcatatacaagagaagaaacatggtggctgaacttgcatgtttgaggaccaatgtgtggaaggggcagtaggctaattacatgtctcaaacagcagaacaaagatgaatgggtggaaatactacagagatgtgtatatgtagaagaaaggacttcgagatgattggcactacccactgctgagcaggagtgcatttgaactgggcatgttcactagactgaggctagagactcccatgttgggaatgcccttggacaaaaaaaccggtgttgaatgggagatctggagtctgtactgttctcagatttggttattccttgactttctaaatgaagactctagggaagctggtgaaagttatgccagccctatatggtgtgagccatgctaagagtccaattcataactgcaaatccttcttgttcaggaacacagtaccatgcagaagttacactgcacgcaagttgacaaaattgtggcacagtatgacaaagagaagtcgactcatgagaaaatcctagagaaggcaatgaagaagaaggggtaatactgtttatttccttctgaagactttctctatgtttatattttgtcttttcccacagttttgctgctgtttaggtcaaggaagaacttagtgttgacttgattttcatcattaaaaattattcctgggaagtaagaaactcattcattttaaatgctctaacatcataacaggtcaatgagtggatgtagcttctggtttggggaaggttctcagcagagattctgatatcttttaattcatcataattatttctaatatgagaaagaaatcttagcctcaaataattgaaaaaatacctctttactctgagaattgattgtcctttttgattttgaactaattttaaatttacagaaaagtttccaaaatactacagagttcccttatgcccttaactcactttccctaaatgttaacatctcacataatcatagtacagttgtcaaaccaggaaattgacagtggtgcaataccattaaccaagccacagtgatttttcacattttaccagtttttccacaagtgcttgttttccactctgggatcacctccaaaattaaatagcatttagttgtcatctcagtatgtgataattcctcaatctctccctgtcttttgtgactttcacttttgaagagagctggtcagttgttttgtagaatggctcttcttttggatttgtctgatattttctcatgatgagagtgaggttatgcatttgtggcaagcacaccatggaaacaatgctgcttccttctcagtccacgatattggggggatgggggtgtgacattgatatgtcccattattggtgatgttaacctggatgacttggttaagctggtatcttacaggtttctgcactgtcagattacttttttccctttataaatactttggggaaaattccatgagaccacgcatacattctatttatctgagaaattatttttcctgcctttgaccttctccagggattccctctggtttttatctctttccttcaatctctgctgatgtcttctagttttccacaacctttggcacaagagaaaaggagaatgagatttctttttcctacttgggttttttggcatttggtttttgttttttattttttgttttaacagtcacccaagatatacctagaaaactaaactctgaaaacagaacagattatgttagttataattttcttggacattggttcatattgccgaaatttcagatcccaagatctaagttcatgacatgaaaccaatgtaatttgcttgaggagtaaatggtgggtaactaaaatgcctgccctggtatcaggcctcactatttgagaggtaccctcatttttattaaagttgtatttttcagaaaaatacaaatcaggcactgattattgagcatctgttattatgcatcatctgccttttgttttccccgtaggtttcactgtgtattattgaggcagaaatgtgcctgttgcttagaaaacattttgatctgtattttaagtgagtaagtgagtcacccacctcggagctcatgtggcaatattggtagtgattacagtaagttttgaggagctgtgattcttctagattctaaccacatcagctttggcctatttcttttttgtaaattaatttctcatatttaatgacattttaggctataatattgaaactgatggtagacagactctaataccaaggagcaaattgttgatgactttatagtactctccaagaataaggttatttgtatttacaagatatcttttcaaaaaatgtttcatgcatttttgtggatcggtgtatttagaaacacagttttggcttaaccaaaccaaaaatttttattaaggagatttcagatccaagcaccatagagtaaatttctttgctaaaaataatattacagttttctgattcaatcaatcatgagtgctacctttagaaatttttaaaaaattgataaaatatatctttacctcatgattgtttttactctcaaagataatgtgggatcaaaatgtaatttattataaacttggtaattattagaagtgtccctggtgtgacacttaaccccccaaacaggctattgagtgctcttggaggtctctcagcaaataaagccctgttttatcctaaacgtagatgagactggaaaagtctaatctgtagatttcttcctgagcctctgctgtcaaacgcagcactcctagcaggctcttcacacagagcatttccaagtactctaaagagtagaatcttagcaatacattaaaagttacttcaaaatcagacatcagatactttcttctggaaagccatatctgaggagagtttctcatcattaatattcaccatgatatcaaggttgcctggacttagtcttgctatgttgcccaggctgaagtgcagtagcacaatcttggcccaatgcaacctccgcctcccaggttcaagcaatcgtcctgcctcggcttcctgagtagctgagactacaggtacatgctgccatgccggctaattttttgtatttttaatagaaatggggtttcaccatgttggccaggctggtctcgaactcctgacctcaagtgatctgcctaccttggcttcccgaagtgctggaattacaagcgtgagccactgcacccagccttcctggacttttaactgcaactgagttgctaaaaagttagtgaaaggggaaactgtgacagtccttggagctttctcatgcaggatctatttttgaaacaaatgaaaggtttccccttactcttacctactcagctgaaaggaaagattgacctgggaaagggaagctttattcaagtgcttccagctttggctaatgactacctctcatatgctttccactcaaggatctttaaggtgatggtaaaaagatgaatgggggaacaagggaagacaagctaaagttgggaaaattctaaattacagaaattattttgcatagcccgaatataaagaaggttgatgcactagaaaggggaaaataaaatcttgattttcaaataaatattacaagtgcatgcccttatgccctcagatgagagtgttgaataaaacctctcattgcatttactgtgaaagatttgtctagaattaagtcacgggaatgtttcggcagtgctgcaaacttattgaataacagaagagagaagaaacttgctcagtgccagccattgagaagtgctagatttgatgcgagaccttgcatttttagagtaatgcttctctcacaggaacttggaattatattataaggaagcattctgacttgagctataataacctagagtatacatgctgaagatgaagctcaggacctgttcttgtttcagcagcgatgtggatattccaaaaggaagacataatcactgaaataagcagtaatagttgctgggcactcgcctagcatatatttcctactcacaatagaataagaagcaaaaattgccctgtggtgccaaggattgctattttctccttcactggcatatttaaaagacaaaaatctggctttataatgaaatggaagaatgaaaaattcacttcaagtctgaggacctattttccagttttcatcccaaataatattttattgaataagtgaaaaatagcttgagaaaaacaggaaccaaaatggaaactgacaacagccccttaatgatgaaataattgttaggtttgaagtgcctctttgtatagtggttgaattgagtaatcatgaaacagataatattttgtaaggtgtgaatctattactagaaagaccagtgttgcccaatgagccatgacatctcatatttgatgaatatattatcttcatcagaaagctttgtagcaaagacccatgggaatgggaaaatatctaatttctggcatgcatttgcaactttccattttcaggggaagtaattgtctcgaaatgaaaaaagaaacagaaatcaaaattcagacgctgacatcagatcacaaatctaaggtaagaaaatgcccatttttacagcagtgacttgcagaagacactttgtaattttttagaaggagtacctagtgtaaattagaaataacagtagcccagagctggtctagtagcctgcagctgatctgggatgtcaggggagcccagggttcatgtttgcctcagactcactggctttaagaagagccatttcatggaacatcttcttttgtcttgtctgttgaactatgctaacaatatttatgttgcctgcctcagaggcatcaaggaaaataataaatgaagatactaaaaggaaatattatataaaatacagaatatacttccctatagaaataacattaaacataggacagaaaaccgcccaaattgggaggtgatacttactccatcctaactttacatggaaatttggaatgagaaaaaattaagagctgatattctaaaagagaagcctaattactcacattttcttaaagacaggagaaaataggagcttgagagactttaatcaactttgtgggcatttggagaactaagtgttaagtcccagttaagaatgaaaacaattcttccagcaatgatagtttttaaatgaaaaggaaaaaaaaagaaaaaaaaaaccaacaacaactgttaaagaaagctcccaaaaatagctgtggttgaaccagccagcctcatctatctatatgcagctgtgtcatctggcctaatggccctgctgcatgcatggagcaggcaagatgttcaagatgttcttggtagctgtatgttttgtagggcatgaactctatagaggcagtaaggcatgtgtctttaagagttattccccactctctctcttcttaactggaatgtttgagaattagtagttgtgcaaactgtcatgattcttagatgcttggcatcaataagaaaagccttggcaacagtatcagtttgcttttgctatataatgaactgtgtcaaagaagagcacattgaaacaactactacagtttattaggtcacaattcagtgggtcagaaatttgggccatacttctgctgattttggctggagacacttgtgtatctactgtcagcagggggcgtatggccttacttatgtatctggtagttgtctggctgttgcttgttttcctacatgacctatcaacctccagcaggctagcacaggctcagtcagagggtagccacagggatcccagcatagcagaagggcaagtactttccagcctctgcttgcatcacatttgctactatctcattggctaaagcaagtcacaggtcacccagcttcaaggagctggagaaacagactccagctcttgacaagaggcactgcaaaaccccactgcaaagagcttggatattgggtggggaggactttctaccctagtgtctatcagggttgacacagtaagtcatgatccagaaataaaagaacacacagctctctattcagacatgtgggcttgtggacatgaagctggagaaacataaggtgataaagaaaatcctgatggaattggtaaaagagcctaaggcccacacaaatcagagtgttggctgagtgtggtggctcacgcctgtaatcccggcactctgggaggccgaggcaggtggatcacctgagatcgggagtttgagaccagcctggccaacatggtgaaaccctgtctctagtaaaaatacaaaaattagctgggcatggtggcacgcatctgtaatcccagctacttgggaagctgaggcaggagaatcgcttgaacccaggaggtggaggttgcagtgagctgagatcatgccactgcactccagcctgggcaacagaggcagactctatctaaaaaaacaaaacaaacaaacaaaaaacaaaacagagtgttgctaagtgaggcagtaaaataagggttcacagttaactattcagagccaaagcaattgatttattttgataagcaataacttcctgcttcccattgattaatacatattattttttggtggttataggtgtctcatgattcaccaattaagttggtgggaggaacctgaaatacctgaataatgttgtgcttttgggttcatacctgacctatgaggattacaatggcaccgtcccctttttcccaaacaggtcaaagagattgtagcacagcacacaaaggaatggtcagaaatgatcaatacccacagtgctgaggagcaagaaatccgagacctgcacctcagccagcagtgtgagctgctgaaaaagctactcatcaatgcccacgagcagcaaacccagcagctgaaactgtcccatgacaggtgggggaattgccgtctccagagtaaacatctaatatttaaaaacaaaagctgattttgtgtgtataagagagccaaggtaataagtgaaatcaatttgacgtacaacatgtagctcttttgtgtatctcatcatatggctgattatgagcaagatgagctataagaaatggcacccaggggccaggtgcagtggctcacacctgtaatcccagtgctttgagaggccaagacaggaggattacttgagcccaggacttcaagacatagcaagaccccatctctattttgaaaaaagaaatggcccctgccatcagagggcttacaggtgttggcaagatacaacacccatatgaacagttaagtcagataacaaagtagcatatgacacatattttaaaatgtcatgggcactaaaggcatccagctcagaggagctctaccttttcagagtggtcatggagacttttcaaaatggtagggctggaactggcctttggagaatgatctggagtctcttaggtagaaaagacacacagagagataaagaccaatcagttcagctcctagagtgaccaggttctgatcatttaatagctacctgtggagagagtctccatttcccttccttacagtgttaggacttctgtgaattttgaaaagataagcctgattaaaaaacagcaaagtatcagtttattttggcctgtgcccacttcagcaaagtgaatattgcatttgaaatactgcaagccatgagctggacttatccctgagcagaagaaggttggtgtttgttacatctttttatcatagctcggttgcagcttgcttggttctcacttagtgcctaccgtatgccacagttagggtctcttgagacacaacaagagtagaaaatagaagcattatacaaataaatcaaacaaaaaaatgtgtttaatgccaactgcataagttatctggctgcatgcccaaattcccaacattactttggagtgacagatactgccacaagaacaaagtgtttttgccctggtttcccattctcatttgaggcaactaaatgcagtctcccatgctccattttctgtgggataatgtgctgtacccccatgcattttaaagcattctatttcgtcctataggattagaagttgtcttttcttttttccttagaaatgctcttgattcactatgcagaaagttgtgttcatcattctgcctttgatgattgctacaatgccagattttaggtgcctacccttattcaaagatacttcacggaatacagcatggcacttgtctaatcttcttttacattgttgaataaagagaaaaacattagctcacaacagtaggcattatctgaaaggaaaaaacaaaatatactaattcttgaattgcttaggaagtcatttgaagagatcatgacctagttactaaaatactttaaaaaataaatccatgggcttcattccaagatggctgaataagaacaggtccagtctgcagctcctagcatgatcgatgcagaagatgggtgatttctgcatttccaactgaggtacctggttcatctcattggaactggttggacagtgggtgcagcccaagaagtgtgagccaaagcagggtggggtgtcacctcacccaggaagcacaaggggtcaggggacttccctttcctagccaaaggaagccgtgacagactgtctctggaaaaacaggacacttctgcccaaatactgtgcttttcccaaggtcttagcaaccggcagacaaggcgattctctcctgtgcctggcttggcaggttccacgcccatgtagccaggctcactgctagtgcagcagtcagatcgaaccgtgaggcagcaacctggctggggtaggagcgtccaccattgctgaggcttgagtaggtaaacaaagtggccaggaagctcaaattgggtggagcccactgcagctcagcaaggcctactgcctctatagacaccatctctgtgggcagggcatagctgaacaaaaggcagcagacaacttctgcagacttaaacatccctgtctgacagctctgaagagagcagtggttctcccagcatggcgtttgagctctgagaacggacagactgcctcctcaagtgggtccctgacccccatgtagcctaactgggagacaccaccaagcaggggccgacagacacctcatataggtgggtgcccctctgggacaaagctgccacaggaaggatcaggcagcaatatttgctgttctgcagcctccgctggtgatacccaggcaaacagggtctggagtggacctccagcaaactccaacagacctgcagctgagggacctgactagtagaaggaaaactaacaaacagaaaggaatagcatcatcatcaacaaaaagttcatctacaccaaaaccccatctgtaggtcaccaacatcaaagacaaaaggtagataaaaccgcaaagatggggagaaaccagagcagaaatgttgaaaattctaaaaaccagagcacctcttctcctccaaaggatcgcagctccttgccagcaatggaacaaagctggatggagaaggactttgacaagttgacagaagtgggcttcaaaaggtcagtaataacaaacttctctgagctaaaggagcatgttcaaacccatcgcaaggaagctaaaaaccttgaaaaaaggctagatgaatggataactataataaacagtgtagagaagaccttaaatgacctgacggagctgaaaaccatggcacgagagcttcgtgacacatgcacaagcttcaatagctgattcgatcaagtggaagaaagggtatcagtgattgaagatcaaattaatgaaataaagcaagaagaaaagattagagaagaaagagtaaaaagaaaggaacaaagcctccaagaaatatgggactatgtgaaaagaccaaatctgtgtttgattggtgtacccaaaagtgatggggagaatggaaccaagttggaaaacactctttaggatatcatccagtagaacttccccaacttagcaaggcatgccaacattcaaattcaagaaagacagagaacaccgcaaagatactcctcgagaagagcaaccctaagacacataattgtcagattcaccaaggttgaaatgatggaaaaaatgttaagggcagccagagagaaaggtcgggttacccacaaaggaaagtctatcagactaacagcggacctctcggcagaaaccctacaagccagaagaaagtaggggccaatattcaacattcttaaagaaaggattttcaacccagaatttcatatccagccaaactaagcttcataagtgaaggagaaataaaatcctttacaggcaagcaaatgctgaaagattttgtcaccgccaggcctgccttataagagctcctgaaggaagcattaaacatggaaagaaacaaccggtaccagccactgcaaaaacatgccaaattgtaaagaccaacgaggctaggaagaaactgcatcaattaatgggcaaaataaccagttaacatcataatgacaggatcaaattcacatataacaatattaaccttaaatgtaaataggctaaatgccccaattaaaagacacagactggcaaactggattaagagtcaagacccatcagtgtgctgaattcaggaaacccatctcacatgcagagacacacacaggctcaaaataaagggatggaggaagatctaccaagcaaatggaaagcaaaaaaaaaaaaaaaaaaaaagcaggggttgcaatcctagtctctaataaaacagactttaaaccaacaaagatcaaaagagacaaagaaggccattacataatggtaaagggatcaattcaacaagaagagttaactatcctaaatatatatgcacccaatacaggagcatgcagattcataaagcaagtccttagagacctacaaagagacttagactcccacataataataatgggagactttaacaccccactgtcaatattagacagatcaatgagacagaaggttaataagatatccaggacttgaactcggctcttcaccaagcagacctaatagacatctacaggactctccaccccaaatcaacagaatatacattcttctcagcaccacatcacacttattctaaaattgacaacataattggaagtaaagcactcctcagcaaatgtaaaggaacagaaatcacaacaaactatctctcaggccacagtgcaatcaaattagaactcaggattaagaaactcactcaaaactgcaaaactacatggaaacagaacaacctgctcctgaatgactactgggtaaataatggaatgaaggcagaaataaagatgttctttgaaaccaatgagaacaaagacacaacataccagaatctctgggacacatttaaagcagtgtgtagagggaaatttatagcactaaatgcccacaagagaaagcaggaaagatataaaattgacaccctaacgtcacaattaaaagaactagagacgcaagagcaaacaaattccaaagctagcagaaggcaagaaataactaagatcagagcagaactgaaagagatagcgacacaaaaaacccttcaaaaaaatcaatgaatccgggagctggttttttgaaaagatcaacaaaattgatagactgctagcaagactaataaagaagaaaagagagaagaataaaaaagatgcaataaaaaaatgataaaagagatatcaccaccgatcccacagaaatacaaactaccatcagagaatactataaacacctctatgcaaataaactagaaaatctagaagaaatggataaattcctggacacatacaccctcccgagactaaacctggaagaagttgaatctctgaatagaccaataacaggctctaaagttgaggcaataattaatagcctaccaatcaaaaaaagtccaggaccagacagattcacagccgaattctaccagagatacaaagaggagctgataccattccttctgaaactattccaatcaacagaaaaagagggaatcctccctaactcattctatgaggccagcatcatcctgataccaaagcctggcagaggcacaacaaaaaaagagaattttagaccaatatccctgatgaacatccatgcaaaaatcctcaataagataaatactggcaaaccaaatccagcagcacatcagaaagcttaaccaccatgatcatgtcggcttcatccctgggatgcaagtctggttcaacatatgcaaatcaataaatgtaatccatcacgtaaacagaaccaataacaaaaaccacatgattatctcaatagatgcagaaaaggccaacaaaattcaacaggccttcatgctaaaaactctcaataaactagatattgatggaatgtatctcaaattaataagagctatttatgacaaacccacagccaatgtcatactgaatgggcaaaaactggaagcattccctctgaaaactggcacaagacaaggatgccctctgtcaccactcctattcaacatagtgttggaagttctggccagggcaatcaggcaagagaaagaaataaagggtattcatttaggaaaagaggaagtcaaattgtccctgtttgcacatcacatgatagtatatttagaaaaccccttcatctcagccccaaatctcctcaagctgataagcaacttcagcaaagtctcaggatacaaaatcaatgtgcaaaaatcacaagcgttcctatacaccaatgacagacaaccagagagccaaatcatgagtgagcttccatttgcatttgctacaaagagaataaaatacctaggaatccaacttacaagagatgtgagggacctcttcaaggagagctacaaaccactgctcaatgaaataaaagaggacagaaatgaatggaagaacattccatgctcatggataggaagaatcagtatcgtgaaaatgcccatactgcccaaggtaatttatagattcaatgccatccccatcaagctaccaatgactttcttcacagaattggaaaaaactattttaaagttcatatggaaccaaaaaagagccctcattgccaagacaatcctaagcaaaaagaacaaagctggaggcatcatgctacccaactttaaactatactacaaggctacagtaaccaaaccagcatggtactagtacgaaaacagagatatagaccaatggaacagaacagagcccttagaaataacaccacacatctacaaccatctgatctttgacaaacctgacaaaaacaaaaaatggggagaggattccctatttaataaatggtgctgggaaaactgtctaaccatatgtagaaagctgaaactggatcccttccttacaccttatacaaaaattaattcaagatggattaaagacttaaatgtcagacctaaaaccataaaagccctagaagaaaacctaggcaataccattcaggacataggcatgggcaaggacttcatgactaaaacaaaaagcaatggccaccaaagccaaaacagacaaatgggatctaattaaactaaagagcttctgcatggcaaaagaaactaccattagagtgaacaggcaactcacagaatgggagaaaatttttgcagtctacccatctgacaaagggctaatatccagaatctacaaagaactcaaacaaatttacaagaaaaaaacaaccccatcaaaaagtaggcaaaggatatgaacagacacttctcaaaaggagacatttatgcagccaacagacacatgaaaaaatgctcatcatcactggtcatcagagaaatgcaaatcaaaaccacaagagttgccatctcacgccagttagaatggcgatcattaaaaagtcaggaaacaacagatgctggagaggacgtggagaaataggaacgcttttacactgttggtgggagtgtaaatttgttcaacgattgtggaagacagtgtggcgattcctcaaggatctagaactagaaatcccatttgacccagcaatcccattactgggtatatacccagagaattataaaccatgctactataaagacacatgcacacatgtgtttattgtggcactattgacaatagcaaagacttggaaccaacccaaatgtccatcagtgatagactggattaaaaaaatgtggcacatatacaacatggaatactatgcagccataaaaaaggatgagttcatgtcctttgcagagacatggatgaagctggaaaccatcattctcagcaaactatcacaaggacagaaaaccaaacaccgtatgttcttactcataggtgggaattgaacagtgagaacacttggacacagggtagggaacgtcacacaccgggccttttggagggtgggggactgggggagggatagcattaggagaaatgtctaatgtaaatgacgagttgatgggtgcagcaaaccaacatggcacatgtatacctatgtatcaatcctgcacgttgtgcacatgcaccctagaacttaaagtataataaaaaataaataaataaataaaataaatccatggcagaagcacttttcaaagcaacagcagtattttagctttttctcaaacccctggtggttgtgtttcttcctcatgatcacaactattattcttggttaaaaatctttgctttcttgacatttgtcagcaacgtttggtcattggtgtttgttgaatgaatgaatacagaaaggtcaatttcctaacaagttatggtaaaatctgagagtgatcttcttgtgtccagagtttctatacatgttcctgctggagtggctctagggtagctgagtgagcaactctccagttcagtattgcccatctctttggatgcagagcaaatagcagtgcctaggtaacctgactgcttgtatgctggtttccaggcagtgctttcaatagatctccataggttatagaaaaaaatttttgtaataatatactatgtagcattttaagttttattcctttaatgcatgtgtgtcatgcatacacatgcattcccacatgcagtggttggtcacctgcaaacctacttttttgctattccctgtgcttacttgaaaccatttagtccctttcattcctgtggctgatagaaacaggaaggccgtttgtgatggttagaacattttctctctctcttccagcccatctgatcccaaataatatgaagcaaaactgagatctttatatttatgggcaaaaatactgtctcctcatcacaggccatcactgtcacttcaccactaggtggccactgcccctcaaggatcagcatccacatagcttggggtcccgtccctcctttttccaaaatacagaagtcgatgagctcaataatagaaagaaaaaaaaagaagagtgagaggagtgagcctagtcatattgctataaacagaagtatttttgtttttttccatgcttaaattatgtctatatatataaaatgtaaactttactgttgtaaccattaagtgcatgacattaagtacattcactttgttgtgtacccgtcactgccacccacctctagaactttctcattttccccaggtgaatctctctacccattaaacacaaactctccatcccccctccctgtttgttttcttgtttttaatacatagggaaagcaaggaaatgcgagcacaccaggctaagatttctatggaaaatagcaaagccatcagccaagataaatctatcaagaataaagcagaacgggaaaggtaagtctgagagtgttcactgcaggaatatggcattgacttgaggacacagtctcaactttctttatgtgtgtacacacacacacaactgagacagcaaaacacttgtggcttttgactaggaattctgctattataactgcaatggagatttgttattatcactgtagaacaatcgtccacattttctggttgcttactaccaccagtaaaattagtttacattcaatatatatgtgctgctttacaaacaaagttgcataaaatatgacataataatataattcttttttttattttattcatttttttttttgcttgtttgttttgagatggagtcttgctttattacccatgctagagtgcagtggcacaatctcagctcactgcaacctctgcctgggtttgagcgattctcctgcctgagcctccctagtagctgggattacaggcatgcaccaccacacctggctaatttttgtatttttaggagagatggggtttcaccatgttggccacactggtcttgaactcctgacctcaagtgatctgcccgcctcagcctcccaaagtgctgggattataggcgtgagccactgcgcccagcctataatcaatataattctgaagcatccttcccaggttccactgggtcattctgcaagcctctcccctgctcaggtgtcagtccgttctggatgggccagttctgaatagcagcaacagtcaggagggcggtcttcttcagtagtccttcacatgggatcatcttgaaagcccccatcccatttgtctcatttgtccttatgttaggtgagttttctggaagcagatcaaggcaggaattgatgtgcttgtgattcactgaggaagggaccttcagagaaagggagtgagaaagcaggaaggcccagggcaggccctaagcaaggatgtggtctcacctagggtcccagtaacctcaaataaaaaattccaccacagatttgtccctctttgaagcaagagtacctggcttttgtgtttccatattaggcagtcattggccgcctgagactggggggaaggtttgtgtgtcctctatagaaggtgccaagtgcaagccctttagacacagctggtgaaggggatctgaggagctgtcaatagtcatgttacccaagggataggcacttaattcccagcgatcaccagtgctgcccatcatccacctcaaggaacatctgagaatacaaatgctatcagctccataaccaagagcctggattacgccaccagcagttagggacagtggggttccttcttttgggggaataatacctagcaagaaggtggccttttggccaaagtccaacagagaaaagctgttttatgagccaggtgcagtggctcacacctgtaatcccagcactttgggaggccgaggtgggcagattacctgaggtcaggagtttgggaccagcttgaccaacatggtgaaacctcacctctactaaaaatacaaaaaaattagctgggtgtggtggtacctgcctgtaatcccagctactcaggaggctgaggcaggagaattgcttgaaccccaggggcggaggttgcagtgagccgagatcctgccattgcactccagcctggccaacagagcaaaactccatctcaaaaaaaaaaagaaaagaaaaaatgtcattctctggatgttattctcagataagcaactttgtttaagggccttatatacatggaaatgacaccttcttcagtttgaaaacaccaaatattccagccatgataaaacctcatgaatttgaactgttttagactatccaaagtgaaatatagaattaaccatgacaaatgtgccaattaatagctttttaccatctttttcaaatatgttacaaagtagactttagctcggttgaggtcaaattatcttcaatttggagttactgctaacttaattagcaagggtcttaaaaatttatcttattttgaaaactgtacttatttgttgtaactttctatttttatttgtgcaactgtatgggggtacgtgagaaaactttacatgtatacaatgcccagtgatcaagtcagggcatttaggttgtccatcacccaagtactatacatttgtggctaagtatagtcaccctactctgctatctcttataagtttgtatccagtggtatgtggttccaaaatatctacaaattggctgttttttaaaaaataatttttctataccaaatgatagttatattctaaacccatactgtgtgtatgtttgtatccactttatcaaactgaggagaaataaaatttaaaaatttgtcatagcactaagaaagatacatagaaactgaaaatcatacttacatttttagatcaaagaagacattttaacagaaattacccaatatttataactgaatgacaatgtaaacactatttatcaatgtgtagagggtagttaaagtgatatttggagggaaaaatatagcctagatgcatatattttttaaaagatgtgaaaattaatgagctaaccactcaaagagaatatgaagttggaaaaacagagtgaacccaaagatctctgatggaaagaaataaatttaaaaagcaaaaaatactgaaatagaaaacaaaatgcaatagagaacattcagaaaaacaaaagcttatttgaaaagaataataaatcagttaactttcaccaagactaaagaagagagagaaagcacgaattagtgatgttaggaatgaaaaggggaattaactacagagaaaaacgctttgaaaaactaagtctactattaaaaaaaactaccaataaatttgaaacgttagatggagtggagaattgctttgaaaaatataaatatccaaaactgactgaaaatggagaaaacctgaacagactggcaattattacagaagttcaagaagttataggtcttttcactcatgaaaaacactctacctcaccagtagtcagggaaatgcaagttaagacaataagctccattccataggagcatccaactgacagaaagtctgatagtactaagagtgggcaaagatatggggaaagggtaacacccagacactgcagatggaaatgcagttggggacaactggattggagtaaggaagagcctgttcgtaccctgccaagtgacaagtctgagtatacaccctacagcagcctttgcctgtgtgcacaagaagatatgcaccatacttcatccactcatctgtttattcaacagacacttattgtgtcaggtattacagggcccacgcacccgatcgttgtagcgttgtttgaaaataacctaatttttgttaatggcaatgaggaaatagtgtagtctgttcataaattgaaaagtccatacagcaaatgaaaataatgaagtggtctggaacataggtgtatctctaaaacataagactaagtggtaagctatgggaagaaacccagactatgttactctatgggtacatttagaaaacacaggaagcgatgccactgtgcctggccagcaacatcagcatcacctgggagcttactagaaattcagacctcccaccccaggcccactggatcaaagtcactaaggggaaggcacaacagtctgtggtttttatcatctctccaggtgattggtatgcacaggaaagtttgagaagctcttatattacacatgggcacatctgtatgtggtttaaaatattaaaacatgggtgagaagatccacaccaaattcacaatagtggtaacctctggggagagaggaataaggaaaactgaatcaggaagaatacacatggggctttaattacatctggaactgtttattgcctttaaaaatgtgagataaacatggcaaaacattaaaaatatcagttaatctgagggacacatacacagatttttaaatattcttctctggacattatatgtttgaaaatactgcaataacaattagaaaaataaagcaataattccatccagagaatttgatggaatatagctctttattatttgatataatattaatttcattcaatgtcataccaaccgttatttgtgcccattgcttttaggcgagtcagggagttaaacagcagcaacactaaaaagtttctggaagaaagaaagagagtaagtattttattatatttttggcattcttcctttaaaaaactataaacaataacatgcttagccaccagatctctagctaatttgtttaatttgatttttctgtacattaaacattccagcttctctgctccctgaaagctaaaataatgtctcactaaaatctttaaggtaatgatttggcaccattttatacagaaaatgaagccaggtttagtcatgcgtaagtcctctattattttctaagattttagcaggaaagatcttcccagaaataattatgagtttaaactctccaaattttgagatgattttttaaaaaattattatctctttcacttaaattataaagttacaagtcatctctcatccctgttttaagattgtaacccaaagttcaatcagaattttttttttttttttttttgcagcttgccatgaagcagtccaaagaaatggatcagttgaaaaaagtccagcttgaacatctagaattcctagagaaacagaatgagcaggtattttacctaaaatacgtaaaaacatgcaggcagctagccagctttgggatacacatgccatggcccacagtgaccagtggcttgcatattgtaattgaaaggtagatagaagaatttgttgcccattactatattttctccattatatccaaaaagaaaagaaagtaccagtttttggagcaggagcagaatctggctgtgccaaaaaaagaatatttggataaattatggggattatgtgaattctaagaatgaaattactaaaagtgagaggatgaaaaaaagagattacgaagtatttctccattttcatttagagttttataatttgcaaactataggcaagggatatgatgtttaaaagcaaatgagagaaaccacctattttcaaactcaatctgaaaacgaagtttaaaaacctccctgggacttacaggtggtatctaaagtcatgagcccccatcactctacaaatcactgagcatgagtggataccatagtcttggtctttttccctgcaagacaagacactaaataaagaaatatacacaaataaagagttatccaggccgggcgcagtgggctcatgcctgtaatcccagcactttgagaggccgaggagggtggatcaggaggtcaggagatcgagaccatcctggccaacatggtgaagccccgtctctactaaaaatacaaaaattagccgggcctggtggcatgcacctgtagtcccagctactcagttggctgaagcaggaaaatcacttgaacccaagaggcggaggttgcagtgagccgagatcgcaccactgcactccagcctgagcgacagagtgactccatctcaaaaaaaaaaaaaaaggagttacccaaacaccaactgtttagttaggccaatgggcatataccagcaccaaggtaaatgtatttttatctggtgcatagtacaggtgggcacctttccaaatgggctacagcccatcagccttctacagtaacctttaattaatggaaatccctctagttcctatggcaacaagaccctcagttatcatttacatttcagactctctcagttcaaatgttattctttaggtgtagttggtatagaagttattattcctaggtaattcaatttagaaacggagaggttttgatgaaatatgtacttgtgccacattattccttcctgttttctcccatctataaaacaatcctatttaaggaatacttttttccagagtaaatgactccccttgaagaatacttaagtaggaattatactaaaaagtacctttgagaaagtaaaaataaaataaaataaaataaaataaaatcttttttgtatggcaattgggtaacagataaatctgacttctagtttcagattctttactttttggtggacagaaattttattcatcaacatacttcctagttatgtttcccatttccttttcagctaagtgcttctattcataagcaagtccactccaaggggacaatacatggttattgtcccacaggtacaattcatttgaccaactcataaacacatcacattctggtacaagttacctagcttatgtttttgctcttaaagcacttctcagaaagtgctcctgggggaaatatgggaatatgagtaaggataaagtcaccatctccaaagctttagaagccacttcagtgattcaacaatgggtagggataaggatgccttggagaaggtttttaaaaattctccctagaggaagggcacagtgaaaggtaaggcacagttatgtgttagttaactaaattaagaaactacttggaaattaattgtgttgcttagcaacaagtttgactaaagaatgtaaatgtgctcagaattactcatcactacaatagtggtgtatgccagagctagagaaaacagtcatcttgtgtcgctagctttggagccgaagtacataatttttaaaaatcagtttgagcttttatcctaacacatggctaattcaagccacaccagagttcttgcattaaactgctagattagtgatagctgtattgattagattgtattgggagggtgctggctttttgttgcagaaattcaaatatgtcttttaaggtctaccacccacaactgacactttgagtcacaaaagcttgggaaagcatagaacatgaaaaggcttgagacctgataaagatttaatgagattcaaggaaaagacattcaagatatcatactgatgcttctggcaagcaaagaatttggacttgagtttctgtgttaagctttgctttagaaatatggcctgttcaattgcaaattcaatcccagatctttctagtatacattttttggcatttaagggtgagaaagctctcaattcacagttactctgtatggtacaacactgtcatgggcacagtgcaaaagatacagtgacttcatttctttcctcataaaaaggcaaggtctggaactatatagtataactgccttcataaccaggtaaacatttcatcagcaagaacagttctttgtctccagacaatgcaaacttctacaacaatcttctaaataattgttaaatcccaagacattttttctaagccagagataaatgtaaacattctcccatagtatttccctcaaaggtttctttctgttctcctgtgaccctactcctaatcggtgtcccaaatctccccttccaaagcaaggcctggaatggattcagtccattagctaaaccagtgttgggggcactggcagaaacaaaccaggcgtcagtatgttttggtcctgattctggatcctcaccttctaggttatttgtaagccactttatgtccttgcctacttggtcagccaactattcacttaacactctgaaggttggggatgtttttcctacttgagttttttcatagacttcccagctacacagtatatctcatctgtcttgacatgtaccatttcaaacattaacgactccattactgtcacacactcgagtctcaaaaattgatttttatcatcaatcctatcatttaataaagagaggtaaaaggttttgcttaaaggccaggttctccacttactgccacagaagagaggcacagtctgggaatgacaggcgttggttgtttgtttcgtttcttttttttctgttgagatcaactaggggaaagtttgtcactgaggggtgtgtacatgttttatccttagctttttgcttttctgtatatggttttgcattcatttttcaaattcacttcaatattcatttattttcttcgttttgtatgtatgactcaattttgacattactatttttgtacaaacagcttttgaaatcctgtcatgcagtgtcccaaacgcaaggtaggaccgaaactctgataagcaagacgttgctttccttctcgactacgtccgtattctctgtgcagtctccatttatgagtcacatctggtcataactaatatctgaagggtttggatttaaaagcttgactattccatgcttggatttctgatgtcatattcatgccaaaatgccctaagtctttagagaattacttctgagggtatttgaacctgtattttctattgcagatttaggaaacagatcatggtaataaagacataaccagaacagtgatgtgcagctgtcatttggactgaccagagctaagacagggtcacagagtcaggtcactcacaaatgttaatatgactccaattaatttttaaagcgctcgctgaaagttggttggtggtttttaatgatggagctgtgctgtgcatgtagaaaccttacacgatgactcttgtcatgctctctgctaagtcccatctgccaaagaccctaatcactcctcataagtaaggtggtcatataatttattgtccataccaggatagttttgagagtgaaaggcagctctgtttataatatctaggactacaggcataaactggaattgcctcagacaaatgagaatgaatggtcacccaactcatataagaacttagctgttggaatagtcttgtaatgtcctatgattcttccttctacaccgtggtcaatactttcttcagaagctaaagggggacaagcacagagaatcatttgctactatttaccgaacttggaagtatttaatttccagtgctgataatgtttcactgtcatcccttttgaatactgtttgtgtcatagtttcatgtttgtatatttttctccatttcttcatttctctattagagtattactatactttaggcataaaaaatatctgggcagagggaaccaaccatcccaaatttacacagaaagatttaattctttggtgttattatatccatcctcaccaaaatgaagcttaacgccaaaatatagaagtaagaagaagaaggaaatcacagtatagtctgtgggttaaattaattttgtcacaagaattcatttggaagatgcttctcatatatctacagagttgaccaaatcccctcccagtgaccttccatttagttggaatatctaagcagacataaatagtaacatcagggcacttcagaatcttcatccgatttatatcttcataggtccatgtttctattttcaaatgtcctttatttcaaagcagcatgtcactaaaaaaaagaaatgggcaatcatcattcctcaaaagatacgtgcatttggttgggcaaaatcatccaggctaccagttggataataaaagtcgaaatgtactatttgattttttcctatgtttccaagcaagtatttctcaccagacactgcccccatcatatcccctttcctcttctcgaattagctggttttcttagtgacaatctgaactcatgaggttgaattcaccattgcttacttcctggtagtccataaaaagtaccctagagaagtaagagcccacagggatagagtttgcacaataagattcctgaaagcctgcatgttcctgtaacattccatttacagaagactccagccaatccaatgtaatatgctctcacctgaacttctctatcaattagatttttagggaattacttttaactaaatttcaggctatttaggaaataagttgtacataagcaatacttattctaatgtgataaaattatctacacacagtcaaagcaacgtgtcaatctgtagaaactaaatcaaacagtttgtggtatggtctaaagataaagcaagtggtctaccctcttctcaagtggttctcctggcactgtgtaaaccagtccccaaaatttaatgtgtataaaaacttcctggagatcttgttaaaatgaagattttaactgattcaatagatctggggtagactccaagattctacgtttctaagaaggtcccaggcaatgctgatgctgcttgtacatggaccatattttgagtagcaaggatgtggtgacaggatcatatttatgggagaagagaggccagggttgttaagtgccttcagataaggatttcaacacacgtaaggccatgtttctgatgttataggcgaaggagatgcagcagatggtgaaattggaagccgagatggaccgcagaccagcaacagtagtatgaaactccaaaatgcaaactgaagcagcaaacccacaaagcatcaaaagactcactcacaaacttctgaacacaaactccatggatgaaagctgtttattttgtttcctttatgtgtaaacaagatgatatctgaaaccagagagacttggaatgtctgactgacttctatttaacagcttgagtattgcatttccttggccaaacaaaaatagctacaaatccacaaaaatttactattccagtaaggcagagtccaaccattgataatacaacttaaacatgtttgctataaaataccatcacaagtaaatgagcttggtgtgaacaactctcctttgtgatgccttaggacatgtttgaactgcagcaaaaaacaaaaacaaaaaacagtgcattagcaatttcatagcaagtgcatgcactaggaaaagaaaactctgtctacaagtttattagcagaagtggtggtctgctagacaaataattttgcaaaatttttctacatctaagttacctcatcagtaagtgccatgtctctaccatgccatcagaggctaatttcctgtaaaagttgtggaaattgttagaacaatagaaaaatagagcagtgtatgtgtgccaaaactcatcattactcaaaggagaactgtgttaggcacatttaagaaagtttacatctgacattgctttataggaattgtttctgcagattccggatattataattcacaccataaagattgtgaagtggttattggcaaacgtttgtaaatgtgaccatgtataaagtatttatactctttaattcacactgttagagagcaaaatcatctaagtattgccacatgacaagattagtaaacaggaatactagaactatgtttgcatgatacacaagcaccaataaagactaatccatacacagttaacctaatgccaaataaatactggttaaataaatgtatggcacagaatataatttgactatcaagacttttagcataatgaaaaaccctctctctatatatatatgtgtatatgaattatgtgggcattcttgatacttcaagttctagtttgaaaaaaatacataactaatttaattttacacaaaaatatttatgcagattttcagaatttcatatcaggaaatgacctttttatgtctgttaaatatcaaaacaatttgctacagtgttaatctgcatggtctttaagcctgctgtagttgagttgcagacagtgcatgaaaaagtattccgctgggaattgagccatgccaccaaagccaagaggagcgcatggaaacccggtagtctagaactaatcagattactgattttagggcacagcaccagatgaattgttgtatatgcttgtaaaaattgattctgtgtgttcctctgaacaaagcggagaaaatgatgataccatcaatattgaaattaaacttccaacttctctaataaaaaattaaaacacgcataacactcgtcaagagtatttgctcccaagacacattctagcaaatgttttgcctttttcatatacatgatatcatcgttattttcaaagggggcttattaataccctcagcatgtttttcacccaaatgatgcaaaacatgcagattctagttgacttcagttgtaatagacttgtttttctcctatttatgatttgaagtggattctgtaaaatatctcttgttcttagtttccttatctgtaaaacagtggagttagactacatatcttttggcactaacatctcatgaaaaattatggttaataaaatatcaccacatttggattgccaattttcaaagattctgagtggcttctcatcatcaaatcaaatcaaatccaagagctcaactatgctcaccattctgtaacacttgactgaattcatcacttgcctcctcttgtttctgctttggagaggtactactagtttttccatttttcttatttcttccctcttttcatcctcctaggccaccataagcatttatattttccagtgttatacatggaaccagtttgtttttctttgatccaggttacttttagtatttgagacatcataccattaatccattgtagtaggattaaaatgtacacacaactcaaatgtgcaacaaaagcatgtgttacctgctattgtcagttcatattgcactcaaaccttgcattatcccttattatgaagaaaaattaatagccaattaaagtaactcagtgtcttcca

SEQ ID NO: 273 - DNA, 34074 bp, Homo sapiens
gaaatatgaagagacgctgcagctgcggtggcggtggcggccactgcagctcagagcggcgcacgcggcggccggggcgggacgcggggccgggcgcggagaagtcggggcgggcggcagagaggccgggacgcggaccgggccggggcgcccacagccgcccgacggcgcccagagagcgcgcgccccgcagccccgcgcctagcccgccgggcatggggcgcgcggcagccgcctgaagccccggcctggcccggccgcacccggccggaggcggagggcagagcgcgcgcccagttgcccgggcaccaaatcggagcgcggcgtgcgggaggccccagagcaggactggaaatgtcctggccgcgccgcctcctgctcagatacctgttcccggccctcctgcttcacggtgagttcccgagggccactcgagcgctcccagccggcggaggcagcccgggcgccgcggagcccgcggaggcgtcgggtctggatcgcggcacggcctacactgtccccttggcggggcgggtccgaggggagccccgcgcctgccgtctcagccctgggagagggggctctgcccactttccgaggcttgggaccgctctcccccagggcgcccggagctctttgctgcgggactgttctttttggaagggtggaagctctcccacgcagacaccttttatgtccagaatccgttgcatccagtccgagggaaactttcgtccgctctgctggattttccaactgtacactgccatgaaatcgccggctctgcgagcctttttccaaaatgccagaatgcagcaggctcttgatgtgttccaagcgtttaggagagtggaaagagaaactgatcatttgggaaagacacgtctgtctgccttctgaaaactagtgtttgttgtctgcctgcactttgcctcgcgattgaggcggggttgtggggttttctcccaagtggactgttgcgttctctgggtgtaattttaagaaacaggggacccctattagccaagatttaatcattattaccagtctcccaatgtgcaccccaacttgacgtcccatttcctgggcttccagtgccacttttccccaggggttctagtaaacctttagctagagaacatcagccctttcagcgggttccagaaattgcgctgaaaacaccaagacagaatttctttggggtggacaaggcaggttttatggcgcgtcgggttcataatcctgacaagccgtggcagatcacgtcgtgttgatgtggatgtcctgagcaaactgtccctaatggtcagacacctgacgtttcaacagcatgacttcacggctctccttcctcaacacccaccacagccaccccaaacctgtagcgggctccggcttcagaatgcatggtagccaggactgaaagtcaggctgaggaccttccctccggaggatcaaggaaagggaagaattgttaacccacaagccaccgggatgctgttttctttgtagtcctgccccaggtggatggctcgcatagctccacaggctttgtgaacttgtctggctgggccagacctgtccagttgccaaggtgtactcagagccccagtgatcccagaattttaacagtcgggatggaaggcttgcagagggcaaaaagagagaaggtataattatagggttggactcctaggcccatctgcttagaattacagagcagttttaatctttggctgaaacatgaaacaaatcagagccaatgaacagatcaaacagcagctgccacacacacaagaaacaaaagagagagatgaaacaggaaacattgtcccccttaaaaaaattgttgtaatatctgtgaagaaaaaagatagtatggtcaaatgattttaaaatttaaaaaattacttaaaaagttggcatgaacagcattttttggggtaaaatcattgccttttaaactacaaaagtgatcctcagagatgcaaccttgtacacaaggtaactctgaacatgttctccctattttgagaggtaggggttgtaattatacttcctatttagcagtccaagctggggtagtaatggctgacaggtaacaagagcccaagtatatcctcaatgaagacaggagctccaaatctcctgagtttgagaatttgagtctggaatcttccataactccggggatctgagggaggagggctccccagaccccatggtgttgggagggggattggggagcaaggaaataactgggaagggcagtctgagctataaatgggagcacagtggagacagaccgtgtgcgtgctggtatgtgtgtatgcatttgtgtgtacacatatgtgcatatgtatatatgaagataagataaaaagggaggtttgcaaagttgagttgggttacatggataaaccgataaaaagttatccaatttcagaaagaatctgcaatggcacaattattaaaactaatgttgctcaaaggtctacttagatccagcagagagtatcagactctagtgcagaaaataaacagaggaaatcattgttcaagttataaatcctcaggatttaagaaaggtttgccataattagcaaggataatgtaaagcaccagaaaagaatgggatattcttcctttcccctttcccccatgacatctacttgattgaagtacttttaacagcaaatgggtattactcaacctaaccaagggaatggtttgctgaatatgtcgtactcaactgataggcgctttgcaggcatttaagaattctgtagtaacagatggagtgtgatcatatatttaaatagaagttataaatctgaaggcaattcttgaaatcttctaaggaattagtgattttttttcctgataaataggcattttattttgctaaccataggataccatttgtctatttatgggtcaacttagtagataaaagcatttgttctatggtgttggatgttcctgtgataaactttaataaatttagtttcacacatcatttagagatttatttgttacaccaccaagtcaggttaagaagtgcaagaagtgcatcctgtgtgaggatgcagtagataaccattatgtttggcatccagtctttgttcggttttgtggctacttctatttcaattcattgcaacttataaatcacccctaaatcctatcagtgagtaaatgaggctctggcaagacttgagcctgttgtttatttaagactgcaaatgtggtgcgagacccaagttcaaaatttgatggcataaaagtatacatgtcagttttactttcctcctcttcaaattctgaaaacaattgcagtacttaatccaaataaagcctatttaatgtcatgaaggtatgcagctggaagatgtccattatcactgttttctttgcttagataaaagccacaaaagtttcagatgtcaaattctagaaaccattcagctccaaaacacagattagcatgaggtatccagaataagtgtgactgtaatgccgcagtggagtgcctgattctctttgctaatggaaacatttgattttgagttttggagctgatgttgggagagatgttctattcccacaccctgtttacttttgtagaattcgttgacttttctgagaggtgaaggctctttcagctctctcctttcattaaagcttattctgtcaagacttttaaaaactttgcagattaccaaatgagagtttaaccgacataatgtgaggaaacgtttatacagggtaaaatagaaatctttgaaaaactattttactaaggacagtttttgtgaccaagaaaacattctttcctgcacttttttccctcctcttagtcataaaaagaaaatgaagtcttgaaaagaagcatgactcacctgtacccaacaggggcaagggtctcagacagatgttaaatatcctctgttaaagagattgacaagccaatttcattcttttatactagctgagttcattctttttccccttaaatgagaaaagaactaaatataggtgggtgatatgtctgtgtaattacatactactatttagggacagactgatgacaatataatcaatcaaagggaggcataaaacatttcagaccagaaatagaagatgatgtgttagtgattgtctacatcggttgaaagatacacagcaaggcatgtcttcagtagactcttcccctggagttgaagtgatcgcagggaaaaccaggaaaaaatccgctaccatcctggacgtatgagttcttaatgggttggttttgtgtacataggccattgcttagtcctctccagtttgggaataaaattattgtggaaagtcatgtgataggtatgtacatctcaaggttggagaaaggatatggtatcatcctaaaattattaaggatattctgttctgcaagggttttccggtttcattcattcagctaaccatttattcagaaagttcatctatgagggcctactatgtgccaagtgccaccacttgccaggtccactggccgaaaggtagcattctcccttccttgaggattcttgaagaatatctaggtgagagaagggaagaaatactgattgtagagccccagagctgagtggatggcacactgcagttgattgcactattttccctgctgggaatcccacaagcgtgcacacacacacacacacacacacagaccacaactgtgttgaagagggtggatgtggctagtcagctgcagatccaacatgcaaactttgcaacctctggttcagctccagtgtccaccctgaggactatggcactataaagtggcacagaaaagtaacttgttttcaactaaagtcaagtggagccaggaatttgaaaacttgaccttattatattgctcataaagagagacgacttttagatatgaagattttaagatgggcaaaagcagcaagcttactgcaaaaaaaatggtaataaaaacaagaacttgataagcagaagtaccacaatggtggtaaaattcagtacagtctgcaatacatacatgcttttatttcaaaaaaatggaaacctgtgctggagtttatctaccagcacccacttcaaagcacacatttacagtaatgactgcttatttaattgggcaggcaatttcatggctaagtaattacttgcacttaatctaatcagtcacattttatgtatcacaacaattctaacgagaacacttttctcagtctgattattaaagtatacagggcacattatataaagtacagaaacttgcaaaatgaacagaaaagaatcattttaagctctccataatggttgatattttgacattatacttagtccttttcaagttcaggttttttcccttaagccttagagtacatgtatagagattaacctgatcaaagattagtttagccccacgtgtgcttgaaaattatcgtttccttcccaaataattttacattttattatgtgtaaaatagatcagaacttttgatttctcagtcaatatagatcggcaggtgaaaaaccgtggaatatattcatctagataattcagattgttaaaactttgttgaggacgggcacggtggctcacgcctgtaatcccaggccaagggcctcctttgggaggccaaggcgggcagatcacctgcggtcaggagttggagaccagcctggccaacgcggcgaaaccccgtctctactaaaaaataaatgcaaaaatatcacctgggtgtggtggcgcatgcctgtaattccagcttctcgggagggtgaggcaggaatatcgcttgaacccaggaggcggaggttgcagtgagccgagatcgtgccactgccctccagtctgggtgacagagcaagactctgtctcaaaaaaaaaaaaacaaaaaacaaacaagcaaaaaaaactttattgaaaaatcaaggacttgtacatggagtatactgtcctatttcactttttcctgtatatgtcgcaatgattcaagcctaagagatacctgagcacatagtaggcactcaaccatttgttgaatgaatgaatattgacttgcaaaagtccagcaggcaccccaccctttttcttctctcactgtctacaaaggctctgtttggtttccgggtacactggcgtgcttccttagcacaccatgggtttaggaatgagatctgctgtggatggctctagcagaagtactgtgtgtgttccctttggaaactatgccaaggactgctttctatgtgcatgatctggtgaattcaggggatgtgaacagttaacctgacacacaggccttttatttagggcataaacctccatgtcaatggtcaaccctgtgcttcctttcatttaggtaactctgtttttaaaatgtgatatctttgggaattttcactctctggtagcctatggtgattatgattgtagtttacaatcattgtgcagtcatttaggattactatcatggggtaatgtattccttgggagtaaatcactagtgcacacacgcaggtgcacacacttacataccaccgagccctccagagctccaggatctcatttagtgctctggatatggttgtctataaaattatgtcctaaagcacacagggcttaatttgtttctaacagatgaaccattccttccagaatctactttattctctgacattcatttggaagaaactactccctttgccataataattttatcagggcccagaccattggacccccaatgtttgagaccattttatggtggaatcatttggataacgttattcagaattcctctggactgggaacagtccctggagagcttcaagtttagacagtaccatggactgactttacacattctcaatcaagagtgcctctgtacctgtatagtagctagcatttgatcaaatgagatgatatatacataaagtgaattgtcgagtgtaatgcaaacattagtcattatcatcatgatcattatgtttaatttatagaggaaaaagaaaggcatatattagatgacttacccaaaaccactttgaagaccaaaaactcacagccattttcttaatatttgtttaatcctttcagataactcttttttgcagattcactcgcaacaaaatcttagtgaatgggaactccattccctagtccccttaattaacatctagaatcttcaactaatcaaaatgttgacattatttgtgtgtgtactctcacatatagtatatggtttctaactcttgttttatctgtaaaataagaggaaaaaactccgtagtctacacagtgttgttacgtgttcattccaatacctttctatccacagccccattctacaggcacggtagtgccttaaggcacttctaagaacctgaatcgtcaaagaaagatcataaggtcaaactgcacttggcatacaatggcagaagtttcaacaactgaatattgtgattaaccaacacttccaattacacaagtaatccaattaagtggggggggcttaaaaacttagcattatatataataagcacatttattattataaataataggtgtactcacacgggaatggttattattagtgcggtccttgaactttgcattgctaaacactgggatgattgatttatgcaatttaaaatgtattaaaggaggctgtatatatattttacaaaagttccttttcagatgcagatgtactgctaaattacttgcttccttccttccttcctgtcttctttccttccttccttcctttcccccttgctccctctctcctttcctccctccctccctccctccttccttccttcctgtgaccctcccttccttccttccttccttccttccttcctgtgaccctcccttcctcccttccttccttcctgtgaccctcccttccttccttccttccttccctccctccttccttccttccttccttccttccttccttccctccttccttccctccctccttccttccttccttccttccttccttccttccttccttccctccttccttccttttttaatataactttttggtaattctttcccccacaagatgcaagagatggtcattgcctctccaacactacacaaaagatttactgtagtttgttgggagctgttcccttcttttatctttctcatttatccagtcaataaatcatacaagactgaaccattgcagtagccttatcatcgatcttcctgctttcaatctgtcccccatgtccctccaaaaaaaccagaaaagtgatttttccaaaataaaattcttaccataccacgacattgcagaaaatcttttggtggcccccccttcacctttccagtgaagtccccactctgcgttaacagatgtgtggtgctctcaactgtggccctgcctccctctgccccttgtcctaggtcaccccgtgcccccttctcttagagcctcctatgcgaatctctcactcctgccccccatgcttgagtgtgctcaagcacactccacctagaccacttctgttccatattcaagacagagatgcctctccatgagccctcaaggaagaattcagaccctgccccctctgtctagagtcctctacaaccctacagtttcttgcccaaccgagactccctggggcaaaatgtttgtagatgctatgtccagaacagtgcctggcccttcagagccttactgattggatgaatgaatgattcgctagttctagtcccgaatttggaattgacttacttcaggcgatgcaacaaacacaggagctccttagttgaccagaaatctgagacaagtgtccctggagggcacaccatgactgattcttgagaaggaagctttggggtttaccggtctaacttttatgcttggcctctgctgcagctgaaattggtgcttcaaatgactttttaattcccagccatttaacagaagtagtactcacaggaaagtcatccacatttgccacatcagatgagccaagtaaatactggataccacttgcagtggtgaactgaagccctaagagtcagtttctcctgccttactgcaacttctttcacttgacccatttaattttgctccttaagagtaatgaagatgttgggtactttgaagggaaaagataaaaatggaataaataccaaccccatttttccatcttagaaatagaatatcaccctagagtgtgagcctgaaatcactgtgttcttggggagctgtgccagccttggggttctccatctggccgctcacatgggtgccctggctgcactgccagcctcgctgggtttccgagctgtgctcattgtcaaatgtgagcaatagcaaaatggatattgatctttagaaaccctgggctatttaatgtcttttttttcctgctttccaatgatttgcatattggaggttcttagattgtatttcttccatcactggttaaaaacgtaactgtaggcctcctttcccgtgtgactctagtcttatgaatgacccatacaaatgctaaccaccactccctctctctctgcctttgaactccctaacttccttcccagaacctccttcatcattttgacccttgttctttgacatccaggccagtgagaccttaaaagcttcaaagtaaacacacacacacacacacacacacacacacacagacacacacacacaaaaacatctttgttagtctttatgtttctggctcctaaagtatagcaaataaaggtttatagtgttttatttgtttattttagagacagggtctcactctgtcacccaggctggagtgcagtggtgcgatcatagctcactgcagccttgaacttctgggctcatgtgatcctcccgcctcagcctcctgagtagctgggactacaggcatgtgccactgtgcctggctatttttattttcttgtagagatggggtcttgttaccttgcccatgctggtctcaaactcctagcttcaagctgtccttccacctcagcctcccagggtgttgggattacaggcatgagccactgtgcccagcctccttgataggtatttgttaaactgagtagaacttagcagcaactgcagagcttggcactttgggcctcactctcttctacattgagggtcatcatttaactttgcctggaggccctatgtccttatactttgtcctcctcagagctcagagtgagcctggctcctccatgtgactttaccatgattttaactgttctgttagttagaggggactttttgagggtggtctgagagccgtatcattatttgaaataataccaaccaacatggaatgaaaggcagggtgctaaactgaaaccaaccttaagaagtgggtgatgtttttatcccttcataactgacgagtagacagaggcttggagagttaagtgatttgtttaaggtcactgcgctaatactgtgttttagtgactgcaagatacccatctttttcgtactttaagatctctgcaggccgtgtgcatctcacaatcagtgggggccccagtctccgttggcctccaggcagcagccatgaggggtgacattccctttgcctgtgtgaaccagaacacagatgctcatactgtccccacatcacctttatgtccatccttgggactcatctggagattcattgcaaataggctgattttgaacatcaagagagtacacatctgagtcagcatgcttggtttttttcttccctcactcataaattacactctcagcactgaaaagaaaaaccacagtgaaaatcagacagatcttctaatagagcagtggagtgttaatttgacattagtgaagcaaatatttattgctggaagaataactgcaactccatattttctcacacagcatcaatcaactacttggaaaggagaatgcccaaaaaatataaggcattgtttttgttttgttattgagacacgtgcagagcaaacagattatctgtcacacgtgcagcagtgccaccaaatgcaagagaaattgccagatgtctttgactagatacagaaatgtcagtgccatcggaggctgctgcaagtgattcacgggtatctcgtgactgttgttaaggcatcatatcattgtgtaaatgtgcgtgttttgtcactgataataaaataatgatacatcttaacactgcttgatgtcttggattcaatgcaatccttcaagtggcagatctagtttcagacttgagcagccgagctatagagattttaatccacatccactacactcctggcttttattatcttcatgggaaaatacttgcagggtgtagaggtttacaaatcaagttttagaagatagcttggttgatactgagatgatggcttctttactgaatgcttagtagcatatttatagcagaatcttccccaactcccaataccttgtaactttagctaaaatctattttaagttagccacatcaaaatcgatcatactgttgacccaccagacagcaagttatactggtttcattccttgactgcctagcagggacactgaggaaatgttgacagttaccaagataactacaactgttgaggctggcagaggtccagtaagcagtcccctctcccctactctggttcagaactaagggggcgttcaacacgagggtgaggcacttggggattaaaacgttagtgtagtgataaatacttaatcaaaagacacagtgtagatgggtgcccatgataggagtgctcatagttccccccgaatgtttcagacttcccatctggcccagtgccacagctgaacaactaaagggacatggtcctcaccccctgggggagctgatcaaaatgcatgtgctttgtaaataggctggttttgaaaagagaaaaatgactgaatcaagcatgcttgcttccacttccataactcatgtgacttcaccaggggagggcagaatgagggagggggagggaatgcccaggagtaccactctagtggagatgccttgcctcaatggaacttgaggcctcaggaaaggaagccctggcttaataaccatgaccatgaataataacaacactaggcagagttttcatgtttagagtttgccccattctagctcaggcaagaatcaggggacttggctaaacagggctgagtgaggttgcctttaatttgaacatggcactctcctcttttgtctagaatctcttttcacaattttcatttagttgagtaatacccttaggtatatttgtctcactgacattcattgcatgtaaaatctgtaagaacgatcagaagctgtctttccatctcaaagccagaattctacttagagggaaaatctgggagttcagatacggaaaattctgtcttctcaacaccaagactttccatcaaaaactagtttagtcttttgaatgttttgtccacatgatggtaaatatctgaatatttaacagatatctgaagttaccatcctgcaggtctcagtttatccaggtagattttcgtcatgttgctgtaagtgactatattctgaatctaacttctcattttcaaatcatctctcagaaaccgtgccttctctatgaagctatttatgtgttgattaaaaaatataattgcttcctcaccagtagcattcaaacaggtacattttatttattttgtatatttaaaaaaagtttgtacagttgtctaactagtgtcttttctgctaacacagggctaaatacgtagtaggtccgccataaatgcctgttgatttgttaatcacttcaggagtgaatatcagaggagaccgtggctttcagataataattccaccagttttaattgctttattctgaacattaggctggtggtagttttgcatgggtagattgtggccaacctgcatgactcgttctgaagataagtttactgctagtatgtctttacccctgggaaataaacatatgtaatcttcttgccattattcttaatttaaagccctgtattgtatgtttaggttatttctggccttgtgagggtgaggggctggacttggaagataattgggggggaaatgtcacaccacgtccctattgtaggagggtgcaaggttcacaccacgtggtgagcagccctgtagagggcatccacttgaagacagagaaccagaagatgcatggcttggtgtaagcagatggagccaagccagcaagcacatcccagctgggaatcttcctagtctcctgggccttctccttccatcactgcccaggctgcagtttcattgaggctggtctccttgttctttcctttcctcacctaaatctgtcattgtgtaaattcacccttattgatgacacctctttcacctctccccacctcctccactttggtgactccagaacatgttcatttctctctgctacagtgccagtcaccttcccttggccgccttgcacaaacactcctcagatgcacaaccttcattgttgcttcatagatgcatggatttgatctctggctttgccaggaactagctaagtgacctcaagcaagttatgttggtgatctccaaggacctcagttttctcaccagggaattgatctacaatgacacttgccactttggaatgtgcatcatacacgagagcacgcactgtgatgacaccttgtagaataaacaatcatttcccaccttcagccactgtctgctgcagaggtggttgtttggcctgattcatgtctgctgctacttcttcttttggctaactttccacctttatttttcagggctgggagagggttctgccctccttcatccagacagcaggtctcatcctaggtccttagagaaaagtgcctggagggcttttaaggagtcacagtgccatcacatgctcaaacatctccacaatggtgcaaggatcacagtgcagatgccacctacaatcgagggccactgggtctccacagggtaagaggacaggtggggtctgggagaggccagagagcacaccactatggaagacccttcttatgggttctcagatgcagagactttatatcatttacaatgatttaggtgttgtccaagttctaatgaagaaccaaaccactctttgaaattatggttggttaagaaaaagagctaagtactgtagaaatcttatgctaaagcagagattatattgtactcctgttaaccacacagtgtgagtgaatagatccttgtttactgaactctatgggaccacttgtgtataaaaagaaaccattagcaagtgaaattaagagactgtgtttcaccaagcctgaaacatgacttgcaagctccggatggtctaaatattctagccatattctggtaatttaatatatggcttcagggttctaagagtaagttaaaagctacctctactagccagggtgcagttcttggattcttttccatgctatgaagctgagatttatcccagtttgagctctggcttatcttccattagagcttttaaaaatagccgagaggcagatctgcgattttttttttctacccattagattgctgagaattaacaagactaactctgggatctgatcacttctccctgtgcgctgttcccgggatatggatagcagccttcaagttccttggggagggatcagatgaatatggagaagagaaaaaaagaaattgtataagatgatgaagacccagaattttatttcataaaaatgaggtctctccaaataaccacgataaacaatttgtataaacaaccttcatgttacatacttttaaaatatttatcattttattcaacaaatatttattgagtgcctaccatatgccaaacactattttaagttttgtttatatagcagtgaacaaaacagacctggtccctgtcttcaagggttttataagtaaatacacaagaagtactatgaaagtggaggggttggggcagcaacaggtgctaaaagagaataccagggggccccattttaaaatcagggcggagttcagaaagcctaccaaagaaggggacccttgagctgagacattgttggctgtgcaaagactgtgggaagagctttgtatttaaagaaccagatgccaggctagatgcagagtgagcaagaggctggctagattggaggacctgctggctgagaaccctgtggctgggatgcagtaaaccagggcagacagcctcacatgaggctgctggggagggtaggccagctctaaggcatcttgcagaccagatcttctaacctaagagaactgaaaagtcattgaagagctttcagcaggggccatgcttaaaatatgattcagctttttgaaagagcattctggctgctgtttggcaaatggacgggagaaaaagtgatttgggggtgaccagttaaaagacctttgcagccgttctggttagagagcacagaggcttaggtaagaggagctgcaggagcaactgagaagtgagtgggcctgagatccactgtacgtggcaggcagaatcaacagactgttgatgcttagattaaaaaattaaacaaaagggatcttcttttctaaacctcatctaacatgaatcactgcttacactaaacttctctttccttgtgggagaaatctggggtgtttgctctctcctttttctaagattacagataccccaggtactgttgagtgctttatgtccataggatgttactcgacatcagttgtcaaacgttacatagcaacggtacccctgtctaaataatgcttatctttcaccagtccatcaatgagcaaattaaaatgttagcaattttgaaaaccacttgtgtttggcattttagcctgactgcttgatttagcagcgcttcgtcagttcaaaccagaatctgtgttagcatcatagatgagagcagagtgggaaggccagaattgatgagctgaaagtcatggcgtaactgagactaggagctaacaaaaggctaaggccaggtcatttggccagggctttaagtacctccccgtacccccattgcagcctcagctagtatatgtgaatggctgacagagccgtttgtgaaatccctcaattccatcccgctgctgttatgctctgtagattctgtctcagtgcttctggctcaggaacctagcattcatctaaggccacactggcaaccatcataaacaaaaggaacccttatttctgttgtgccagctttgcttttagttaattgccccctttacttttctactagagagaaaattaattctgaatggacaagaagatgctagatgactagattctgtctcaggatgacagacattttgcacctgcctgctgtagacaaggtccataaaataaaagtgttcaggaagtcgaccgtttttgaactagcgtaagggaacttcttttataggccagcacagcactcatcctccttatccagaaagaaatgcctgcacagggcagcaggtgtttgccctcctggcctgctcgtgaagcgagtggaaggctggctgaggcagagtgattaggagcacagcatcagagccaggctgcctggattcatggactggctctgatacttgctggtcatgtgctcttgggcatgttccctaacctcagtttccccacctgtaaaacctgggtgatgataatacctaactcctaggttgttgtgaggagtcaatgagttggtatctataaagggctgacaacagagtctggcccatcgtcagcactttattattatttctgtaatttcttaatactataatgaatctctttcccataccttcaggcttacaaaggtctcttcttccccttttcttgcccagctgtgaagtaaggtcaggcccagagttcatcacaaggtcctacagattctaccacaataacaccttcaaggcctaccaattttattatggcagcaaccggtgcacaaatcccacttatactctcatcatccggggcaagatccgcctccgccaggcctcctggatcatccgagggggcacggaagccgactaccagctgcacaacgtccaggtgatctgccacacagaggcggtggccgagaagctcggccagcaggtgaaccgcacatgcccgggcttcctcgcagacgggggtccctgggtgcaggacgtggcctatgacctctggcgagaggagaacggctgtgagtgcaccaaggccgtgaactttgccatgcatgaacttcagctcatccgggtggagaagcagtaccttcaccacaacctcgaccacctggtcgaggagctcttccttggtgacattcacactgatgccacccagaggatgttctaccggccctccagttaccagccccctctgcagaatgccaaggtacctcagagctctgtgttctcctctttattgagtaaagtgggtgatccttcttaaaggcttgccatgggggctctagggcacccttgaaagggggaattctgcatcatggcggggcaggccaaggtggggctgctgcgaggtgggaggagatgggaaaggctggggctgagggtgctttagccagtcaggagacctgggtctgccaccaacttgctctgtgacttggaacctcggttatcctactgaagtgggtggtggcatgggatgatggttctagaaaattcctaaggctcctttcagctctcccatcccaggaacctcttcagtgattccaagaggacagtgtgaaggcgatgtcataaccacacctggaaaagatactaaacaatagcagctacccaggccctggaggaggcggggagggacagaaaggggaggtgacagtgggatttgtgtggggtgttagactccacggagactgtccaccagagtcaccctggtgagtcccgacactcttaggcagaacagcctgctgaggtcccaggggttatggctcctgcccaggccacgcggctactgagttttcctgctggaccatgagtccaaaggtccttcctccataccccacgttcttttcatttcactaaggaaaatgtaaagtcaccataatcagaagaggggactaaggagagcaggaaacaattaaaccttataatgtcttttccttgaatgatattctagtaattatatttggaattcacaaggcatttccttcccacaagcttagagtacacgtccatgtgtaactcgatcacctccaccatctccccgcagagcctgtgaagtcccaggcaggaggggagtgggcttctgcccagtgcgtagtgtgaacgtgcagacccgggcctgctgcgggtgggcggtgggcaggtctctgtggagtatctccccggccgtccccattgacttcgtggaacactctctagcacggtggctctgtaactgtggagccctgcttaacttttgtttggtggtttcttcattttttaaaaatcttttttcttattagtcctccaagactactcataaccaatagaggtatcacagggcacttctgccaaagactgctccgtgttatctttttttaatctatgttattgtgagcttgtgcaatgcaagtggctcttattataataatgaaatagctactgagaaagcccacctggtggaggctgcttcctctggatgaatcttttcatggctgtgtccccgcgtgtgagatgaagccctgtgctcagcccatgtgcccaggcccagcattcctgccggctcaggatgcccttgggggtttgttccaacacagatcaggagccaggctcatttcattctgccttgtaagtttcaaatgcactgaagaggccaacatgaattagggcagagagggagggcagcctctgatgccggctccattgctgcagctgtcagggggtcccagaggttttcctagaatgggacacagggaaaggagaccaaaactctgcccttcaacatgttgattcccctgggcaggtatcagaaggagaatcggctcatagggtgatacctggactggggtgtgctttctgggtcagggttgagtgggtgtcttgggaaaatgggtaagaataatgggcttcgaattatactttggggcctttctggttggcagcactgcccaaaggcggcactggacactgtagctgcatagcatttctcttgttttatactggccaggtccacttggtttgagatagtagcaggagaaggggcttcatacctacctttggctcgctctgagtatagtctagccacctttctgggatttttttttttttttttttacggagttttgctcttgtcacccaggctggagtgcagtggcaccatcttggctcactgcaagctccgcctcccgggttcaagtgattctcctgcctcagcctccaagtagctggaactacaggctcccacgaccatgcccagctaatttttgtatttttagtggagatggggtttcaccatgttggccaggatggtctccaactcccgacctccagtgatccgcccgccttggcctcccaaagtgctgggattacaggcgtgagccaccgtccgcccggccgccatctttcaaatgatctcaggtaacgggaggaaggtgtgaatgtcatgaattaaaacggcccacagataatccagaaacctggggttagccaggagcatccccgcaacccgccgttccctcggggcctttgtgaaggtctgctgaataggaaaagcctgcccactttctagcagagacaccaaagagcctcaaaacaccaaaaagcacggggagccttgagtgcgaggtctgagtgaggaggcaggtgcggctggggaacttgctgggcgggcgtgggccgggctgtgggctccgaacccgaccttggactagtcctttgcacccactcaggttctggttccttttcctcaccttcatgcgcctgcacgggctctgatctcttctgctctttttagtactgggggaaaaattaaccatcatcacgtttattttcttacctgcctctctaccccgttgcactcctgggtgtggctccgcagatggagtctgaaagcccagtcagcattgttaaggctggcgcccaggggtactccaggaggggacacttcattcccgtcaatgtccctctgcagacctgtctgtggctcctggagggaaaatgccccacaagtgaaaattattaaatattggcatggcaattaaagacagcaattgtaaagctgacctttttagaatttaacaccttttggacaaattggcaagtatgtggacttcagaaacggtagccaatcctggaagccagttctgctgtcatcagccgtgtggcattggtagttatctgacctactggagacttcattttccttttctgtaaaatggcaaaaatataagaatcaatagggttaatgtgcagaatcctgtgggcatcaggatagggcctgaatgcaaagctccatctctcttaacctagagtaagtcgcccttctgggccaatggctcagagaggaatgaaaatgacaatgtcgactgaccagggaacatcaaagtgtttcatgatgcctagccataaaacacttcctcccattttctcctccctgctctgctaaggcagttgtgggaacatttacccagattcttaagaaatagactctttaaatcccaggcctgattccttgatgacagaaaattaaggtggaaagagctttaggaccttagatactacacgagacatattgttaagtaggaaaaaaggaagttataaaatagcgtgaataatatgataccatctgcataaaactaataatgaaaggagaagaagagggactctttgcaaaggaatcagatatttatggaggaaattaatgactgcctcagaggaagtgacagagttgtctatctgggattgtcggacagagacttcacttttggtacctgttgcattttgtgctgtgatcttctattacctaagcacagtcatcacagaaaatttagattaaaaaaaaaaaaaagcaagcaaacactcccagacccagaggaatgctgtggccacagatgcaggtggcagcccagctggaaggaggacccaggcttcctgagccagcctagctgcctcgcaagatggctgaggggggggggggtcagtggaaggccgagtggctctggtagctgaaagggtccattcttctcttgtctctcgccttgtacctcttggcctgcagtgtgcagcggagtcttcaggaagttttcagatccttccccaggacagctctgagaaggaacaaaatggactcagccattggtgtctttccagacccgggcaccagaaagactgggcactgtgtgcccacgcgggcccagccacagcaggttgtccgagctgtctgtggccgccagcggagacaggaagaaaggctgggagaacgtcttcaaagaccgtacacgcctgcccaggagaggctggaacctcctcctttgaactcttctacttccctaattgctggtccatagagaccaagctgaaaattagtttaaatgctaaattgagtttcaaaccacgagcctcagcccctctagaaacaggacaccgtgtaaaaatagaaactttaagtcaacttgtttttctaagctttatacagctttgctgtgaggtccagagtcctttggcaaataagtgacgtttgaagagattcaggtgtgctgggagggttcattcaggatggaactggctactcttcattataaaaaagtcaagacagcgtaaagtaaccctgaaagaagatgctttgcctgaatcaagtttagcgtcagagcagccataatcctctgccgagattcttcagaactatgcagttggaggggtagaagccaggctcattctttcagggatggaatcaaatggtaattaaaagcaaatgattgccaaggtcgttagagatgccagagcctcaggatcagactcgtaagcaaatggaattggtctttctccaaaatcctgcactgatttaaccacaggatcgtaaatcaaaggggctgtctgaaaaccagacagccttccccaggctgtgcatctgaaatactcgatcccagcacatgtacagcaggggagctacacacgggagggagaaaagcaccgggctttgggagtacctgagaactgcagaaaaagagcatgctgtgctttctctctcaaattctttaggagccgctaggctggagccagcatatgtttttgaggtagcttgcctctcagaggctttttagaggatgtgtgacctgtgcagcttcctgatgtcagtgacaccatggggatgttgagtcaggtggtcttggagcctggacttttcagcctagctgcaggagccagcatggagggacgtctcctgagcatgtgcttggtgtggctcctgggtgggtgggcggctgcgtctctggggtatagaaggagccaggtgcttgtggaagaattccataccacttttctttctgctagtgtggatttgcagaggtgatgggagatggacgaggtggtggacaaccagaagttcaagaagtcatgacctaagacagtttcaagaactagtcttacaggaaggagaaccctagaagaaaactgtgactgctccctggagccaggtgtttcctataaggcagcaaatgttgcacaattctatgaaaaaacagagctggcaattgggataggttgagggggtcttgaccctgaaggggttgcttttgtggaccttttatctgggccgaggtgtgcagtgtcacaatcactgggctacaaggctgctgatagacacttctattgcagaaacagctcattatatttcttgactccagagtatttcagcagataaacaggcatgcaaggttgctttatttaaggagttaggggaccaggaaatatttgttgtcagggacaatgcaagtggtaaatattttatcccttaaaaggcaagaaagctcagaggacatgaggaaaccctgcaaaagcaggaaattggccatttaaaaagtacgcatgaggtccctactccagggagtgtttgctgagccccaggggagaaaggaagaggatgggccagccaggagtgcccagtggatttacagcagatttaataagtctactttaattatttaaatgaatcaaaatgcataggagtggaagaaagaaacaagtaaaaagaaataaaaattcttttcggaaaccattcttaaagtcttttctcttaaagaaccatcttcttagggtcctttttctccagttgctgggtgaggcaaaatggtcttttttattattctaatgttaactaaaacaaaaaaaggcctttgtgagctcacttctcagattctaagctgccttggaagtccatttccagaaggctaatgttgctcttaaggacctaccagctgcccctgctgaactccagggtgcagaagtgtttggttgagttttgctcccctctgcttcatagccaactacagactcaggaattagcagcctggtttctccttttctccctcatcctcctggcccaggccccttcctggacagtggtaacaggcccgaggtggctgtgcagcctccctgaggctctctgagtacccctggcaccacagaggtgcctgcatcctggcagggatgacgcagctgcacggggtctgtacactgaggggctgccctcacctgtggagagtgggtgctgggcagcaggtgcctcagtccatccaggctgccatagcaaagcagcatggactggggacagccactcacttctcacagttctggacgttggagagccaagatcaaggcaccagcatggtgggaggctggaatcctggtcagggctctctcccaggttgcagactgctgacctccctctgtatcctcatgtggcagcaagacagctggagaactctcaggcctcttttataagggcactaatccccttcttaagggctgtaccctcatgacctagtcaccccccacaggccccacctcctaatttcctcacattcgtggtaaggattttaacatggattttgaggcgacacaaacattcagtgtgttggatagacagcaagcctgcctgggcagtctgtacctaaagccacagctcttcacccacttccttctgaaagtggcatcatcatgctccctttagatgatcaaaatgagccccaattcacaagctcctagaatcccagataggaaaagcaccccgagttccctcccacaaggcaggtgggcgcccatcatttgtgatgaatgctagctactccatttaattctttacatgtccaatgccagctttctctccgtttgcctgttagccgagaaccctgtgcaactctctcctggatgtcatgggaaatatgacaaagagagaacacttggtcttggcctcaaaggactcgtaatacagaagacccgagaaggatgtacctgcagggttatctacagcagaaatttaatcaaatacttggcacatcgcagttacaaagaaagttttcaacgtgggccattggccactgcaggtttctttgtgagaaacatttgtgtgttttttatccgagggaacaaaaccctaggaaaggaagtttccatcatctactcccatttttcctccttcttgaacaaaacttttagctcaaggaacactgcttttgaaggcttgtgtttcatgcagcctgcttccttagttgatctgttcacaagatcacatcaagtaatttcttccattctgggaagatggcgaaaacaaacagatactgtcagcagatgttgatgaaccacctttccagaaataaacagtggcagggaacagagaaagcctggagaatccccatcagtcatcagccggagaagaccttttcctgggctggagtccttgctggggaaacgtctgttctctgcagcctgaggcagctctggccaggaggcagcactcagcaagtcctaagaccaaattaccatcctggctccactttgggtttgtaaagtcatctgactttttctctccaggtgccttagttgcctcgtctgtaaaatgtacccatggtctcctgggaggttgtaaagtctaaggagatgctgtacttgagcctccgagactcgaatatcctgtaaatgcaagctgtagctatttaacttgttacctggagctaagcaggaatcagagagcagagtaggcagaaccccactctttgcctagaacattgctcatttataaagtataagtttctttctcatttttagaacaagtttaattttttttccagagattatttgcatgggatcctttttctcccttcccctttctgatgaaagctttttatagtgtgtgtaaagaatagcaacaaggaaacactttctggttcctctgctttaaccttcaaatcttctgggtacagaagctctggctttaaatagccctttctaagattcggggaaaggggatgccgtggaagccaagttggtgagcctgggagaggacacttctcaaatgagagtcatgtcttggaacatggatccccaaaaaagagggaataattttacggagcaaatgatactccacagtaccaatcactcatcatgtttaaaaactgcatatctaattctctttccatgtatccatcttggaagaatactgtttccgaaaaacatctcagaaaagagaaactttagaatgaatacaatatacaggctttaatttctgcttctctgtagttgtgcctgtaggtctctaatttttattcaggccaaagattatgagaattagcataaatgatatttttaaaatttgttacaatacagaggtgtctccttattcaacggtagctaaaattgtcccctcgttgacagtatccacagaggccagaaacaactctgcttgttatgataactttggcttcttcatgactgctaaagagttgtcccagcacttggggaggctgaggcaggcagattgccctgagctcagaagtttgagaccagcctgggcaacatggtgaaaccccgtctctacaaaaaatacaaaaaaaaaatttatccagtcatggtggtgcacacctgtagtcccagctacttgggaggctgaggtgggaggattgcttgagcctgggaggtggaggttgcagtgatctgagatcacatcactgcactccaacctgggcaacccccagactttctctttcccacctccaacagtgagaccctgtctcaaaaaaagaaaaaaaaaaggtaactagtcaacaaccaaaaaaaataaaaaataaaaaaaattggcaaagaaaaatgtaaattaagaccacaatgagctatcagtttacccagtaggatggctattacaaaatacaaaacgatcaaaactagaaaatatccagtattgggaaggatgtggagaaattggaaccttatacattgctgatggaaatgtaaaatgattgagccactccagaaaatggtacggtggttccccccaaaaattaaacatagaattaccaaattgatccacctattctccttctgggtacatacccaaaagaattaaaagcaaggacttgaacaaacatggtcctagcagcatcaatcacagtagccaagaggtggaagcaacctaaatgtccatcgacagatgaataaatcaacaaaatgtggaatagtcatacaatgaatatcagccttaaaaggatggaaattctgacacattttacaacatcgataaaacttgaggagcttatagtaagtgaaacaggccagatacaaaaagacaaatagtgatagttcccctcagatgaggcacctagaatagtcaaatccacagagacagaaaggagaatggaggtttccaggggcaggagagagaatgaggcgttagtgtttagtgggtgcagattttcagctggggaagatgaagaggttccaggggtagccgcacaacagtgtgaatatactttaaaatggctaagatggcaaattctatgttaggtatttttttaaacacagtaataaaaaaaaaaaagcatctagtttagggatttggcaagaccaatacccaagagccaggtttctcccactccctgcaccctccctaaattctcaggcccacctgatggaaaacaagcctccctgcgcctgtgctctccacaagacaaaaaaaacaaacaaaaacacaaaaaccgtgcctggcctgcttttctctgctatggaacagcaacacttcagccaggaccatcaacctcctgaagtgaccaagtcccactgggtcctcgtctcggagctcaggaccccggcctcattattgctaaaggaaagcacctctgaaaacactcattctggaacagcccaggcgacagcagtgccccctcccctcccccgagcctttgccttgtctgagccaaacagcagttgctcctcgacgtcatcccagaagcatctcttgcaagaactaacgtcccttatttcatttctctctcccacccccaccttagaagctctctgagctcttcctgaattgatcctggtatttgacaaattaaatcttttcaggaattgagactctcacctccttagaatgaccagaaatgaaggagttgcaactgatgtttttaaattcccaaattacagatggcaaaccaagttgtggggaatggcgcagaggggagctgaaggctggggttggggaagcggggctgccagctaggctttggggacctgcccaggcggagggggtagccactaccagcgatgagctgcaaatggtaggagtgcgcagctcctcctggctgacgggaagatctgactccgcgcttcttgttaccctgatggtacgagtgcttcatgtggcctctcttatttcagcatgtgctgggctcacctgtaggtggtgctgagccaggggccggctcctgcacagcttgtgtctgataacaggcatcacaagagaacaccaccttcctggctgtgaagttttcgtgatttgaatccaagttcccagccagtgtcagagggggtgtcactggtccccacaccaggaccacaggcctgatttcaatggtgactgttccagcagttatgcaggagccctgggctgggcacactatgtcatactaactttccatcctgtgttttgaatatcagaactcttgttaaggtgaaaactctggaacctttaccccatagtagttgaccaaggaaacgtaaaggcaaagctaccgtactcagtgatgctttcttttaactcagtttgtattttcttcaccttaaggtgcatttgaaagatagtggcacatagggtgtcagaaaggcctttatttaatgttcacaccaagtgggtgcactgagtgggaaccaccttaatctgctgttcatttcttgcagcagttatgcaagtaagtataatgatcaccattgtaaaaatgaggaagttgaaatggagagaaataaatagcttgcccaaaatcaccagctgtgaagcggccggggctggccttggcccccaggaactggccggagacatctttccgtgacgtaattaagctctggcctaatgggcctcatgcaggagctcatctccatttctcctgtaacttgcagagggcagctcactgctgagcacaggttgcaggcagtttctccgtgtgcccctaagccctctgtaggaaactgcaggccaaaaaatgcacgtagagcttggggacgcccaggacttggccttcatctcaatgctgcagctctttgatccaattgtctacaagccacaaaccatgttagcaaaggaaacattatctcgcctgaagtgcaactctatgcccatctaatgcacacagcagcagcgcaagttagtgagcagcagctgggaagcccacagctcttcctgccctctctgggaaaccaaacagcgaccacaacgaaatcacatgttgagtgagggctgtaaacccaaagaccctggtgactgagatctccaactttagagaactgctagagaacaagtgtgtgcctgcccagtcagtgggtgcccctcagccttggccacaggacagatgtgaggccatgaactgatggcatgggagcacggggctggggtggcccagccgtccccagaacactgagctaccaacttctacctccctaccacagcctgatccgatcggcacgtgctgctagtggtcagcgttctgctagcctaccagctttgcaccccctgggtggaaggagaatagcggagggatgacccaggtgcaggaggaggcagcccgggctcagaggtgtctgaagaccttggtcagacagcgaggcactggcactgtgttcaagcaccctgtgccctgacttccagcatctctgacgtgtgcacctctcaccagagaggcctttctgtgccacaaacctagacagcccttgttccctgctgtgtccgtgttataaaatagaccaggcaagagagggtcttctggaaggtcagagctgtggccgtcttgcttaaagctgagaaagcaggaagcagatgaggaacgcagaaaccttctgaacctggaggcgggcagaccgggacagagggcagtgtgcgcgtgtgcttgctgctccgcagcttccagctctcccttcttgcgggccgcctcctccattccctcttctaaaggaccttgcgtttcctacacaactccatttcatccacagccagtggagcgctggcctttttatttttctttgtgtctcctaactttttttattaaaataaattttaattgtggtaaaatacacataatgtaaaatgtatcgtttaaccagttttaagtgtgcagttctgtggcactgatcgcattcatgttattatacaaccatcaccaccatccactttttcatcttcccagactgaacctctagtcccattaaaccactccttgtcccccccttccagctcctgcaaccaccattccactttctgtctctatgaatttgatcactctaggaacctcatataagtgacatcatacagtgtccttttgtgtttggcttatttcacttaccagggtgtccccaaggttcatccctattgtagcgggtgtcagaacttcctgccttcctaaggctgaagagtatttcattgtatggatagaccgcattttgttgatccatccatctgtcagtggacacttgggttgcttctaccttttggttattgtaaataaccctgatgtgaacatgggtgtgcaaatatctattcaagtccctgctttcaactcttttgggtacatacccagaagtgagattgctgggtcatatggtaattctgttttgttgttttttgttttgttttgttttgttttttgaggaaccaccttactgttttccatagtggctggaccattgtatattctcatcagctgtgtttaagggttccaatttcttcacatccttgccaacttgtgattttttgatagcattttttgatagtagccatcctaatgggtgtgaggtgctgccatcatttctttttgaaatcaagtgtccagtgcatgtggtctgaaaacttaataggattctaaagtgtccacatcacacctgaaatgtttgcataggtctgtactgtcaggcaaacgtgtgcactcacacatcactctcacctctgtctgtgcccggagcatgattccagttggttcttggtgtcgaggttgtcagtgatggtgatctggtgcctggtgagaccccatttgccggaagcatgtgtgcactgctcccttgggaagatagaggcctctgaatgtgtttgtttcttggcttcagaaccacgaccatgcctgcatcgcctgtcggatcatctatcggtcagacgagcaccaccctcccatcctgcccccaaaggcagacctgaccatcggcctgcacggggagtgggtgagccagcgctgtgaggtgcgccccgaagtcctcttcctcacccgccacttcatcttccatgacaacaacaacacctgggagggccactactaccactactcagacccggtgtgcaagcaccccaccttctccatctacgcccggggccgctacagccgcggcgtcctctcgtccagggtcatgggaggcaccgagttcgtgttcaaaggtaggattcccatctcaagtcccagtatcacagccaataaacagccctgtgacatttttgtggaggcagagctgagggaaaggacctcttttctgcctgagttcccaggaaagaaattggggagtcatttctgcctcagtccttcccaacgccctctgagtttctccctgctcaaaatggatcaggtggacagcctccacttgcaggcctgaatgcgagaggagtccacgccactgcctgtgggaagttgccagccagggaggatgttactgggaatgaaatctctggccaggtgcggaggctcatgcctgtaatcccaacactttgggaaaccaaggcaggaggatctcatgaggccagaagtttgaaaccagcctgggcaacatagtgaggccctaactctataaaaaaataaaataaattagctggatgtggtggcatgtgcctgtagtcccagctgttctggaggctgagctaggaggatcgcttgagcccaggaagttgaggctacagtaagatatgatcatgccactgtactccagcctgggcaacagagaaagaccctgtctctaaaaaacaaaaaaagaaatctcaagtctgcactttgtgttctttatacacaactctggcagattccatgctgcccctctaataacactgcgtttgcttgcatgccacagtgctttcctgagtgagcaataaagaggtgttagtgacacctcaggtgctcagagctgtcctttccaaccctgagcttgtcgtgtaattgagaggttgtcacctgcttggaggtgggagcatctgtgggaaggttcaggctgtgtccttatcactaaacgaggaggggaggaaggagctgcaccaggctgctagcaacaaagcagggcttgtggttgctatttttaaaaggttgctttttttttccccctaagtttgagcatctttgtaaaatggtgtcagccctatcataccaaataaagagggatagcctcgatcccaggtgactcctccaggatggcgttccagggttcagtcccattactataaaaatgtttctgttaacccagaaagtcctggaagactttagccctccttttgggtagcaaggtttgctccaggaatacaggccctttgagaaacttaattgaaagcaagcaatctttacttgactccaccctgaagctcatcgtgttatacacggaagtggccccctggagggaccttcagaagcaattctccacaaaagctgggatttgtatttaatttattcactcacatttttcttgcttgcagcctaacttattttagatgcctgatgtatgggcccataggaatgtgtgagaatgccaaccagaataggtgtttgacaccaaaacttttagaaacccgaaaaccttttgataaaagcaaaattccagcctttgttgaatatttttctttcaatcccaacgagtcagcatcaccaaataaaactccttaggagcactccgagctgtagttttatttgttgcctgcaggcactcccagctgtattctgggctcagtgtttctacaccagatggtctgtgttgcatggccacacctgcagcatatcggtgtgactgccacccagatcaacaggttgaactcttctccgcctgacagtgctttgatgactactgctgtcagatgggtgggtctgtaggtgggattgtttttggaaaagaaagccttgtctagttagagtgtggccagtgttttctgggtgggtttctggatcccacgcctactccctggagtcatggaactctcctttctcctttgcagtgaatcacatgaaggtcacccccatggatgcggccacagcctcactgctcaacgtcttcaacgggaatgagtgcggggccgagggctcctggcaggtgggcatccagcaggatgtgacccacaccaatggctgcgtggccctgggcatcaaactacctcacacggagtacgagatcttcaaaatggaacaggatgcccgggggcgctatctgctgttcaacggtcagaggcccagcgacgggtccagcccagacaggccagagaagagagccacgtcctaccagatgcccttggtccagtgtgcctcctcttcgccgagggcagaggacctcgcagaagacagtggaagcagcctgtatggccgggcccctgggaggcacacctggtccctgctgctggctgcacttgcctgccttgtccctctgctgcattggaacatccgcagatagaagttttagaaagttctatttttccaaaccaggattccttactattgacagatttgctttaccaaaagaaaagacatttattcttttgatgcacttgaatgccagagaactgtccttctttttctcctctccctccctcccagcccctgagtcatgaacagcaaggagtgtttgaagtttctgctttgaactccgtccagcctgatccctggcctgagcaacttcacaacagtaattgcactttaagacagcctagagttctggacgagcgtgtttggtagcagggatgaaagctagggcctcttatttttttctcttaattattattatatttctgagttaaacttagaagaaacaactatcaagctacaacttttcctgccattttcctgtggttgcagcctgtcttcctttgaaattgttttactctctgagttttatatgctggaatccaatgcagagttggtttgggactgtgatcaagacaccttttattaataaagaagagacacaggtgtagatatgtatatacaaaaagatgtacggtctggccaaaccaccttcccagcctttatgcaaaaaaaggggagaatcaaagctttcatttcagaaatgttgcgtggaaaagtatctgtaattaaagtttcgaagtaatttaaccta

SEQ ID NO: 274 - DNA, 65096 bp, Homo sapiens
agtcccaggggagggagtcagagctagaacaccaattacaaaccacaggcttcctgctctagggagttgatccagaattgtctttctgaaaggaagcactcggaatccttccgaactttccaagtccatccatgattcagagatactgccttctctctctctgggattttatgtgtttctgatagtgaattgttgatgtatttgctactttgcttcttttctctttcaagacttgatcattttatatgctgtttggagaaaaaaagaacttttgttagcaaggaggtttcagaaatgattttggattttctgtaagtgtttaatttagttctaggggacagcatctctcatcccggagtaaatttctgcctttgacctgcatggattattttttcaggctgcggaatttctcggcacctacctgtagtatggggcacttggtttggttgcagagtaagaaggtggaagaatgagctgtacttggttaagcagttgaaaccttttttgagcaggatctgtaaaagcataattgaatttgtttcacccccgtggattccagtgggcccgacagcgcaacaggtttgcagatttcttttgaaattcctttttcccccctccctctgcctcagcaaaagaaaagaatccatataacaggttcatgttcaattgcttggcttttcagcacttattctgaagactttataatatttttaaacttgaccttggaacacagagggctttgtgggtgaggtgtatttatatttacttaagggtgcacattttaaaaatcttattctgtgtttgtacaaagacgcaaattttcatagtgcctagaaatagcacagatctattctactcaagattatttgtattttttcagggtattctacctagagcctgtggttaatcgcctccctgctccccctaccttttattccctaccccctcagggaatttggatacatgtgaggaatagtcctttgtttttcttatgaacctagaaaattacagatcataaaatctggatattaaagtagtttccaaaagcatctcatgggaaatcaaagtgctcggcatttccgagctggagaataaaatcaagaatccttaagagagaaaagaaaatggagatggaaatatgaattttaactgggaaaaataattggaaagctaaccttttcaaatactctaattatgaaagttggaaaaggttgtgatgctcaggattatcctgtaatgtgtgaagatacataaattagcacctaatttataggcaaattttggtaaaacacaaaaaattatggtatgtctaagttcatgaaaagtatgtaaatgcagtgggcctagaaacctggccacactgaaatacagtttaatgtggaaacttttctaaatacatattgtagcatctttggacatcaacgtgtggcctgaaatttttattattgttccctcttctcctccattaaaaaaaaaatctccttgtggtatttagtcatttaccattaacacatattatggcttaaaaagggccatcccttccttttctgagctggagttcttcacgctcacctttgatgcatggccttagctgtttactttgccttgttttgttcatgaacattgggtttagtgcctggcaacttgatgcatatggaagagcaatgccaagtgatctgacataatacaaattcacgaagtgacattcaatcacaagcaaagttggaaattccaaagagaagtggtgagatctttactagtcacagtgaagatgggagaaaatgacatacctgcagcagatgtgggctgaaaatatcctcttctctgcccaatcaggaatgctacctgtttttgggaataaactttagagaaaggaagggccaaaactacgacttggctttctgaaacggaagcataaatgttcttttcctccatttgtctggatctgagaacctgcatttggtattagctagtggaagcagtatgtatggttgaagtgcattgctgcagctggtagcatgagtggtggccaccagctgcagctggctgccctctggccctggctgctgatggctaccctgcaggcaggctttggacgcacaggactggtactggcagcagcggtggagtctgaaagatcagcagaacagaaagctattatcagagtgatccccttgaaaatggaccccacaggaaaactgaatctcactttggaaggtgtgtttgctggtgttgctgaaataactccagcagaaggaaaattaatgcaggcaagtataactttattatatttcactttccatctgtttgaaatatgtctttcttcttttgtctcccaaatgaaataccatacacgggcttctactgcttagctttctatttcatagaaagagtagatactgccttattggcattctaaatttagcaaattattattttatactctggaggaaatacataaatcctatattttagaagattatctgcttattttaaactggtgttgcataactacttagatagacataataatacctttttttcaagtgatatattctgggcactaatttttgatagatgaaatatatgagcttatatttaattgatgcgaggattgtattttacatcctgtttaaattgaagtaagcactaagaaggttgattttaatggtcagcagcacctgaaattctggaatgcccttggagcatatttgattactgtgtcacttaaaattcagtcaagcttgaatgctatggctggccttacaccacgtgtggcaccctattgctaaccccaaaatggagaggactggattacaaaatggacacaaggtgtaaacctgcctcctgatcactttggccttgtccacacataattttatcattttcaggaatttaaatttaacatgttttttactgatccgccaagtttttcagacatagtttcttaggctttcaggctgtgaattttgcctgtaagtcattcatacatggcctattctttatgtggtgaatttatgaaatgactgggggcacagcatttcatagaccaattgctcattccccatagtaaagacagagcctagagggctatacctttttaatgggcattccattgtcttactccataaaatgatgttgcttattgattgaaatttatcatgtaaaagaacacttcttgctgtagctactggacacaggttaaaatattcttaagtgtgatccatcttagcatccaaactcaaattttaattttgtggtatgaacagactatgaacagaaccaatttattgtatgaattttaatttttgtctacttaaagaagataggaaaatttaacagattatagaacttattcctaaacatgtattctttaatatatggtttagtggttattcattatcacttcttaggcaatattttgaagctgggataaatgaagtgaaggagaattaggtgaaaatggaaggctttgctatttagaaaaataggaaagaagagtatatctggaaaaatggcataagatttttttgaataagataatttggattctaaaatggaattaggaatacttaaaagctgaactcataaatcatcttgaatactatggcaattggaaaggaaacttccttcctggccttgcctagttaataccctgaagcatgaattgtgtgctccattttaggaccgtaagtaattttgctagtcatattttgatatcactgaagtttttgagagccatacgtgccttattgataacctgtgatagcatgttcagtgggctaattatgtgttccataaaataatgtattcttttaagttttaatcttattatcataaagctctacataaagtttgtgttttcataaaggaaaaagtaaacaaacagcaccagttggcattctctttgccattcattattttatcaatctttatcatgtcttctattgttctatcgtttttctcactctggcaaatcttaccaatctattttgttttttaaactattaactttgatcctatcattatacattaagtattgcttttactttgtgaagagggaatttcatcataacttagcaaagactttcagcctttacagtggatagttttatgtcattggcaatttttagtcatctcctttctgtccacatatgcttcgtttaggtctttaaataagttttttcactagcttagtattcatttctggatactttccatattggtttcggtttattgtctgttaatcaatttttaatctacaacagttattaaagtttttcaacagcctcttgtgagaaacttttttaaaaaacaagcttctgaattatatatatggttttctttatccattctttgattaattctttcaaagaactctagtgtgttagggacacatggtttacacttctggaatccatgctgtttgttccttatcagattacactgcaactcaggtttactcaactgtggttagccaagccttccatttaactgaagttctgtttatatcttctagagatgtgctttgctgaactttagctttctcaatggagagctgtaccctggtgtcagaaatctaaaagtagtcttctcttcggttttgaggaattctggataattctgtgaatccttctacctatgaattgttgtagttacctgttaagattatttgtctccaaagattgcagtcaaatctttttaaacttgaggatgctatgtatgtaccaaaaaatgtacagttatgagaacagtgatttaaaaaaaaaaaaaccatgttgttatttctggaattctgagataatttctgaaaatcagacatttctttacattttgctcaattaattcagtgtatagacaatttcataaggaccaaactgactgaattttcatttgtattatgattttaattttttcttagacaaaaggagacccccccccttgacaatgtgcccccaatttgttgaatagtaaaatagaccatagaattgcctctaaaagaattttgtctcaactttatctgatggctgtatgtataagggcattaaaagtcaagttttgatgatttttgttctgattcttatctctcagtctttgtgcttaggtttctccttgccaatagtaatgattcattttacaaggtatgttcaaaattataaattgtaatattcttctaaaagcgctagaagaaagtcaaaatagaagaggaaatggtgttgcctttgcccttctatttctcaagtcctctcttttccatttcagaacatctcattttagtcctgtccaaattttattattttccccaagagttgcttctttatattactgtatcattccaactctttttgcaggtttgtcattgtctttaaagtatctaattcttaggtttcccctatatttgccaaaatatttgtctcttcctcttctctgatttccttccactcttttatttttcttttgttttccactgaatttgtatatttaggattaccttccactgctattctggattggtattttaatagccatcaaaaatctaggtcaaggaaacttttcagatctcctaattacctggcggtgactgataaaaaggactaaatgatagtgattacttcttactgtttttattcacattggaatatattctttctctcctggtttataccattgtagaaggaaaagtgttggagctgattcattgtctaatttccggttttctggtttggttacctcttatcaatgtttgtttcttttatttcaagcaatattattgccaccacttctaaaagtgattacagtcatattttatttctcaatcctgtttatcatttataaatattatttcaagggacaactcaaaattaatctttcttctcagagcaaaagagtaagaggatcttagtgtagcacaaagaggtcaccaattctctatcacactcttcctgctcagctggttatcctggattttcttagactccaggataaagttatgatcaagattaaaatgtattcccctgagtcttcagacctacaatgggagcagcagtagtttagcacttggccagtagcagtgagcacctcctggagaaattcccctttgcacaatgtctctgcttgcctcttaattttatctgttagtcaacacatagttatcccatctttgcatttttacattatttgtaggcaggacctgaaactttaagtttttggccaaagctagagagacagtcctatattgcaaactatagttgacaaagtgtctaaactgtgacttggggggcttgacttttagttctacacacagaagaatatgctgacactaaatattaatagttgtgtgatttgggacaaaatagtgtttacctttctaggcttcagattcccaggctgtgaagttgaggaattaaaatacaatattgccaaacttgtgctatttacatgcactttacatgtattagctcactgaattctcataataactttatgagagaagaaattcagtacctttattttttacattttacagataaggaaactgaggattaaaatgttaatatctgtcaaagtattaactattattatctagtaagtggtgttgctggaacttgaactgcagagcccatgcttttccagctctaaaattctgtatatgtaagaatgccacagatgaagagaatatcagtataggctttgtataaaaaatttatttccagagtagaaaggaatgaaagtgatgagtaccattatctgagattgatccagagtgcatcatatcctgctaccttctaataatctctgtatttcttctatttctctcattttgtgtttcatttgcaaagatactagtaaatcacaatgtctgtttactcagtatctcccttataatgtaacatatttcatcacctttctcttcattttaaaagtctaggttaagttatctaatataggaacctgaaataataaacactgacatagcatgcatttaactggcattgctcaagttagagttccttctatgaagaaattttgaaatagaaattttgtgattttgttttgatgccagcctttagaagaagtacagagtagatattcaaagtatgatcaactctgttacttatgtaaatgaaggtgcagaaaatccaattaattaattactgactttggaatgtagtcaggagtacaccatcagacacagttcctctgtgcgcacaaacattcttaggtgcttgtctcctgtgatcccagctcagagccttcctgacatggcttttagagtcttctattctagacttggccttgttgttagaagcctggcacccacagaatagaaggaagctgcagaatatttttaatgataatttttcaagttaagaagatatctcttttataagttatcatcaaacagatttatatatatcacagttctgtacttcaacaaaaatttgtatccaacaaaaatttgtaagttcagcttcgtacatatctggttaataggaggtaatgaatgaaatatgtccctggctattgctcccatcaggctatttagtgttcatttggcagactctcggttggtggggggcggggctgggggggtaggtacttccttgggttttgtattatagtaaagtgtgtatgtatatatgtgtgtgtgttgtaattagcccaaaactagccataatttactttactttttttgtttctttgtattttgagatagggtcttgttctgtcttccaggatggagggcagtggcacagacacggctcactgcagcctcaacctcctagtctcaagcgatctgcccacttcagctcccccaagtagctgggaccacaagcacggggcaccatgcccagctaatatttcaattttttgtagagacagggttttgccctgctgtctgcagtattaaaggtattcccgggccaggtgtggtggctcatgcctgtaatcccagcaccgtgagaggctaaggtgggaggatcacttgagcccaggagttggagaccagtctgggcaacatagtgagaccgtctaagaaacaaggtattcctggagatcatggttttgctttttgtttttgttttattaaaaagtctttacattttgttcattggaaagagtttattggattttttaaatgtttttttcccttttatccctttcaaattgctaattacagtagattttttaaaatgttatagatgagtaatatcctgttaggaaccagaattggtagcaggatattgttagagaaggctgtgagaatgatattccattaactttatgtagaaattttcttccaagaagcttaaaatgatttgcaatacctggagccacgtaagaacaggtgatattaactccattttacagaaaaggaaatatattgggaaagagaaagaaagtaaatcatctaagaacaaagttgcacagagactgagccagtctggtttgcaggagataggagagtaatcaatttttaaggaatctgaagatgtggattcctcaggggtcagttctactgagtggaaatcctaaaggtcttttcctatttccctgaggactcatattctcctttcctgcttcatttttctttacagaattattgacgtggcatgctgtaatgtttcagttttgtagttgtctatctccccacagtggaatatgagttctgtgaaagcaaggatttttgtctcctttgttcaaagctgtatccctgagaatggcacctaagtatacttactccttgggcatggtgggtactcagtaaatatttattaatgaatataatgaatattgtggtattgagtaactctgatggctgggagatcactctagaataaaacatgcttatcacatttttaaagtatgttataaggtggattattttgagtgtgtgtggcttgatatagcaggctatgttcctttactcttctgacttaccaacagcctcgtgtgttgttatttcaaaatcataaatatggctgtaatcagtatgtttaaggtgctcctttacacaggatttttaaattttttctttagtttgatagcttaaaccttgctgtttaggatattttggttttccaagaatgatttattcaggtcctgattttaaacctttgattttaggatattagcgtgcatccaaaggaccttaccttcttagtacttaaatttgtgattacccgttctggtttttagataccctaaagcacagtttttaatcttgtttgtgtgtgccacaggcccctttgagaatgtgatcattgttattgaccataggcacaaaatacacacaaatacttaacatacacaattttgcataaaatctcagtgagttgactctctaagacatatctagagatctaaggactccagatgaaaagcaactatcctaacataatcccaattatttcaagaaattaaaccaaattctcaaaacaaatttaccttcagtttacttaatttgaaaagtacttgtatgtattacttaaagtcagacagacaacaatattgtgatgcagttataagaaagtggcctgaccttaggtgaaggaactccagaagtaaaaattgatgtctgacaaagatcttcttatgtgtagtaaatgaattctgctctccaaatatgaagtgaaactgcatcaattcaagaaatgcctacaatcccttcagcatggtggttccactgaaaggcccttaagaataacggatattttactcacatgttttgagattagtagaaccgtcgtggctttatgtgtctatttagttactacattcagaaaactgagggtataaaacaaactttaactttgttttcttcccgtgtctttagtttccagtctttaagctccattgctttccctagggcagtgttctttaggcccttaaatttctatttgctctaatggaaaactttatatattttttaaagccaagatttgttgttgcttgcttgttttgaataacagataagctactttacatactctttttatctgggttctaaacttacagttcatggataaattttattttgttctatactttttaatatattggaatctgtgtttaatttacaaatttggaaacaccagagtaaccaaaatgatttaaaaactaaggtttttttaaaattgtaagcacaaaggcctggtgcattattcctcaagataagaagttagactacaatatttagaaattcttgtctctaggctgggtgtggtggctcacgcctgtaatcccagcactttgtggggctagggcaggtggatcacttgaagtcaggagttggagaccagcctggccaacatggtgaaaccatgtctctaccaaaaaatttaaaaattagctgggtgtggtagtgcacacctgtagtcccagctactcaggaggctgaggcaggagaatcgcttgaatctgggaggcagaggttgtagtgagccaagattgtgccactgtatttctgcctgggtgacagaatgagaccctgtctcaaaaaaaaaaaaaaaaaaaaaaaaaaattctggtctctgaatctaaagcagaggcagcataactatcttcacgactcctgtttgttgttgttgctttaaatctagaataccctgtcatgatggaaattgactataatacaactgtaattttaaatagcacattaaattattatgtacctatcacttttgtgcgtgctagtatatcaaaaaggtattgttatacatatataaatatatgacatttgagaaacactgttggtattttacttctgtagaataattcagatgagactaaaggccttataagtctacttattttgctattttaaaaaaaaaaaaaagtatagatttccattcgttttttcccccaaaccattttctacagtcttttgtattatctactttaaaacaacaaaaaacatcttttatatgatctaggctttgtgttccctcattttaatatcttctacctggaattatattgatgatctgactttaaaattcttgtggtcaagtttctttaacttctgaaggactgtattggctctatattggaattaagtcctattcagttttccattcttagagtaaaatacagttttgatggaggggagggaaaagtggcagaatattccatttgtgaaatataatcatcaaatttcaagctagaaaaaacaatcagtccagtcttctcattttatatatgaagaattgaactcagattagtgcttatcaaagaattccaatctgctgctatatcttactggccaatatttttagcatagtttatttatttattataaaccttttggggtcactgcagggaaattaaaaagcacatgtcagcagagatttccccctgaacattccattaagaagatatagactgccgcagggtctctttcctctttgatccctagtcaactacaggcatactttaaaataagtgaacagaccaaaaatacctcaccacagtttagcaatactttacgtggtgcatgtgtcatttattctgccacagaatcactgcacatcaggtggtctgtagtcctggatcttctcagagcaatatcacctctttataaagtctaggctaagaatcttaccaagactagaaggggcactggattctctagatgccttataatgtggttttcctatttgtaccaaattctgtgacagatactatagtaattcaaagagcaacacaacaccttagccttgtccaactgaggagaatcaacttaaacagcaggaggcattatgtattgaatgccagatgtaggtgtaggcataaatgcattagagtgctgatttatttattttctctttttctttctttctttctttctttctttctttctttctttctttctttctttctttctttctttctgtcattagagacagggtctctctctctgtcacctctctctgtcacccaggctggagtgcagtggcaccatcagagcttactataaccttgaactcctgggctcaagccatcctcccacttctgcctcccaaagctctgggattacaggcatgagctaccattcctggcctaaagtgctgattttcattttttcaagagtcattcaaatgactgtggtaattctgtctcagattccctatgattaaagaaaaaacaaatgaaaaaatattaaattttaacccaggcaacttcaagtagcttaaagttagagaaagaagtactacagtccgggtgcggtggctcacgcctgtaatcccagcactttgggaggccgaggcaggtggatcacgaggtcaggagatcgagaccatcctggctaacatggtgaaaccccgtctctactaaaaatacaaaaaattaactgggcatggcggcatgcacctgtagtcccagctactcgggaggctgaggcaggagaatggcatgaacccgggaggtggagcttgcagtgagccgagatggtgccactgcactccagcctgggcgacagagcaagactctgtctcaaaaaaaaaaaaaaaaaaaaaaaaaaagaagtactacaacccagtcataccttctaaatttttactgttatcagttaattacaggttgttatattcctgtgtgtttaatactcatctttagcattttctttaggagtctagaatgactagataccatggcttttttttttcagattgtaaactgactttctaaaatgtaccaatcagtccctgttaaattttagttaaaacagtaaatttagctttaaacagaattcaacatattggaagttttgtttgaatttatctcaactagcttgattttaattcttcgcaaactgcattccataagggaagaaataaatactaagaccttttatgtagaaggtgaagagtatttgaatatcatatctatttagcaaaaattgtttctagtaccattttcttattattgactttagtcataaatgtgtgttattcctgttccctaaaatgtgttgattttagtatgatatgaggcatatagagaaccatttaagaagaatgtaccgatccactgtgacattaggttattttactctaaagttagtaaactctatgacatacattaaacatttaaaaattatcattggtgagtatttgggattactgagttgcccccttggggtatatgaaaagtccctaggcaccttatgatcattttaagtaaaagcaagtcacttaatctttcatctgttggtgtagagttgggggagaactaaataatctttaagatcctttccagctctaaacttttagagtttatgcttattctagaaatagatttcatatattaaagggacatgtatcttgcctatttagttctttttctttgtccttagttgttggacatcaaagacaaaatttgtttggtaggtgatagaaaaaaatctgactaaattaatgtcttacaataaataggtagcagaactaagcatgagactcagttgtactcccagtcttctggtcctgtactgtctttgcattccagttaacacactcaaaaaaggagcctttctctggagtttcatattttaaaatatctgtagtagattgaggacccttattgtaaatgcttcgtcaaggttgtcccaatgatcagagcacactgacttcaatcactaacctgcacctaagtgaatctaacctttggaaaaacctgaaagagccagagacaacctagaaccagtctggatgaaagtaaaaggagtaggatgcttctgatcctaagtactctgtgaagtgaattattagagataagctgaatacttatactaaaaataagatttcagagcagctggtgggtgttcacccatggggtgagggggatagagctctagtatgtaagcatctggaggcaactgggaagagtggaaatggggccatctgattagtaactatgccttgttattaaaccgtgactttctgcattgtgtattcccagagttggaaaacttccgctggcaaaaaaaaagagaagggccgccgtgctgttgctgagggccatacagtagacacaaaagcgccttcttagaggccttcagcagaggcaacttgtacaggcaggcctgttcctctcaaagactgggaatcagattctttccccagggggtttccaactagtttgcacttcagaaaaaccttttctttctcctgctgttcacgccctgcaaagaattttcttccaaccaaagaaattgttttataatcaaagatccttgtccttagttgttggacatcaaagaaagtttggaggagactgggggattatgtgagtgcctagaatttattttgaatgcaaacttgcaacattagcaagtcccccaaagaatatactcatctcagagctgggagagagcctaatataactaagtctctattcttccttggttggatgtgcctcagtaagatacaaatgagttgaattgccttatctggacttaattcatgtatgtttggttcttgaggtacacgcttactggaagaggtcccccaacccatcttcccttttaaaactggtgtttggaaacatcaaacactactaataaactcgaaacaacaacctacccccccaccccaaaaaaactccttttttaaaccaatgtttgactcttgggagtttggggtttctcccaggacagttgatatcaccaaatgttgggagccacattccctgcattcctctactgttgctgaggtgttgatgatgtcattttctcccacaaaggaaaacctcagcaccctgagggcctgaactcaggtcttggcaggtaaatcaaggaagaacttacttttggatttcaactgattgagtcaggcataaagagacacaaccaccatgttaagtattagtgtcacagcctcatctctgggacctgaatagacaatttatcatttgaagaaaattaagactataactttaagaaattatcttctgggtaagaacaatgattcattgaatattttggttcttacactttggggcatttatagggcattgttctcagagattttggctccctcttaaatatccttctctgaatccacaaattttccaagcctttccggaacctgtttgtagattatctagctttccttccttgagcagattaacaacaacataaacaagaattaggggaaaaaaatgatggatagggcaaatttaggcagaattatgccttgggcaaagtacattcttgttattttatcttggttctgtggttatgaactgaagagagcatttgctctagaagatttccaatctcttcctatcccttcatcacaaccacagagtagtggttagaaatagattccaggaacaccagaaatgttcagtatttccaatggtgacagctaacagtgccctcacagggatcctttgagcactcttcctctgagccttcttgtggtgtccttgtggtcaggagacacatcatcaatcacaaagacttgccctggagacaaacctggtaaaaataatcaattgtctatctttgccactagaaacaatccttttgtttttacttggttctgaacaaacatgctgtagttttttagagaaagaccgtctctttcatggaatcatcaactgaccattctcaaaaatttgagatgtgctagtttgtgttaggaaggtaaggtaggatctgggaagtaagtaggatttgccaaaggtttttattctactcagcagtgctaacttgtctgtgttactcctatgcaggtattagattataggttttttttttttttttatgctaggaatatatggataaaattcactgaaatgaaagtgtccctttagtttatacaggggaatagggaattgaatttataaggagagagcccagcctgcaactgacctttcattttcatagtcttatttctcctgagttgatgtaagcttaaaacaaatgaatgtattatataaaatgtcctactttttcaagcaatgtcaatcttcagggtatggaataggatttggcattttgtttccatttttattgttttgttttctaaagggaggtttgagttagagcctgtctggcaagattccatacttctaccataccacctgtcctggcagagacaatggaatcaaaagtcaagttctttatgactgcacctgcctcgtaagtgttgccagaagatctgattttctcttgtagctaaactctacacagaaacgagggcttggcacccaaacagtgggtgcatacccaaacacatggatgttccaatatcaggaggactagtaccactagttctccagatgacttgtaaaatagtctttggcatgacattcaacgattatttaatttatcaaatggaggagaagtaactttctggtttacctggttttcaagactttcatgaggatctattaataagcatgaatcatttggtaattattatttgaaaattacctgtccagtgctgcatctagtgagcatgaaggaaagtatgttctccccaaaatagatcaggaacatatctctgaagtcagaccaccatgcaaagttcctaaggtgagaaactaccatttctgcctgttgctttttccttttcccagaaatgtaggttaccctatggtcaccagttgaatgctctgtgattaggcagttgttttgtaggcagtctgacatcctagatgagaacttctttccttttgaatatcagagtgtttcttgggttccctcagggcagagttacttcattatcttctaacttatgtataactggatgccttctggcctaagaacataatttctatcaccaatcaaataattaagataatatgcccaccaaatggtgctctttgcacaggattcatatataatgatataatatgataataaggcataaaaggtattctaaaatgaggagcgacatcctacagtgaaaagtgctctcagtagacttgtattttaatctcagtgctgatccttcttagctttatgacgtaaagaaaaattgcttaacctctttgagcttgtggcttcctgagtaaaatgggaataatagtaataaatggcctaactacctgaaatgaaataatgtatgagtgttgcctttgaaaatggcaaatgttaggtattattattaatagtaattaaacttgagctattccttattcacctaattactatcagaaatattactaagtgtgaaggttattgatttagactccgttaacctatttgcgttcaatttggcatcagcttaacataactaagcaagactgtttgtatttttaatgtagccgaaaggacaaggctttagcttcaaaattttgtgggttaagggtgctgattaaatattaccataatgtagtacaggtagccttagtggtttaaagaatgactaatagtatgtgagttctggggtgggaacttaatacctgttacttgtggtacggtgaatcacttatctgccctggacctttgtatgtgtgcctgttccgtactggtaaccccattagcttccttccatgatcaatgaggtgatcactgacacaaagcagctgttttctaagttttgacttatcagagtctgagggatcctagaaccacattatatatcactcttccatcttccctttttgaaaatttagagtatttttttaaattgctgctattggctgggtgcggtggctcacgcctgtaatcctagtactttgggaggctgaggcgggtggatcatgaagtcaggagttcaagaccagtctgaacagcatggtgaaacccagtctctactaaaaatacaaaaattagccaggcgtggtggtacgcaactgtaatcccagctacttgggaggctgaggcaggagaatcacttgaacctgggaggtggaggttgcagtgagctgagatggcaccactgcactccagcctgggtgacagagtgagactttgtctcaaaaaaaaaaaaaaaattgctgctactctgggacagttgctcagaatgctggcgcttcagcttctggtgtgtagcttgcagccatgtttctaaggaccagaagggaaggagttcaggattgtgaaggggactactttccccagttcattatactgtgctggtcccaacatgttttctgaaactcagcagatacgattctatagcctgcttggaaattatcccgcaagtctctaagactctcagttccctatctgagaagaattggatcaaagtaagaataagcagagtttttgtcatagcatctatcaaatatttgtctccctgaaaaaattttcaggtaaagaccatcctttgagccttctcagagaccaacagtctgcagtataaaaaaatctgtgttcagtgttttgtaactttaccaatttgaagtctcttcccaaaataagtaaataatgggataaaggtaattatgggtttcctcatcttttctacttacctgttccctgttatgattaaacacacatggcttataactcttttggaaacaaactgaattaccattattatcctttcaacacttgcatggtattataattcatttcaatcaccagtacaacacagtgggagttaggagaccagtggggcgtggggaggacctggagaagggcaaacattttcctttttattggttttgggaagcctccttcttctccgaaggcacttcttggggaaaactgttttcttcccaaagcctaataaagattagtaagagatgtctgcaaagatttagaagctctttgaaagaaagacaaggataaacattcactatcactgttattatcattaaaaaggaaagcccagcatgtgatgttttgggtcacttccagtggccttgtttgatgttcacggttccttttttgacctttacttcttgatatctttatacatttattgaggctattggacaaagtcttgagatactgagcaatacagtgctaagaatgaatgattgctagactccatttctatgggtggaatttctgaaaatgtgttttgtctttagataccctgttgttccagtttggcaatattggtggcaaggttaatttaatatctggtcacttgaatttttacttcctattctgtaccttaccccagaaccaaagttctataggatacttttcattaaataaataataaattaactggaattttttctctgctatgcttattaaccagagatatatcaaaaaagaagcagatgtaatggacctaaaaagcaaataagaacttcccagggagattgtaagtttagcccagtctcttatattatttcatgccaaaaatgaccataatgatatccttgtagtgtagacaccaagtaaaggctaactttcattcaacatgatgtatttaggcaggaaagtgcaccaatacattgaagaaaggatttcaacagtacagattgaatttttaaggacttcctggtcttcagaaaggtaaataaatcactgtcaacctaaaaggaagaagctgaggcaaaattaatataagtggagagcttatttgagccaagtttaaggattgcaaccccagagcctagattcaagttgccctgaatatacactctgattagcagcagttacaagtggatttttaaaagcaaaaaagagggatagggagtgggctgatacaaagttgtttgtcagaaattctcattggtttacagaaataacattgattagtaattggctatacatttttaagctacagggtatgggttatagtgtctggtgtggcattattagattaatttatagctatttgtggcaatagcaagcagtttcaagagatgaataacatagcctaaagcggggagtaggacttgactgcggtctcattttaatgtctctctgggcctgataattaaaaggacttgcattcttcatataaaagctattttcttttctcatcacaaacttttttttttttttttgagacggagtttcactgttgtcacccaggctggaatgcaatggtgcaatctcggctcactgtaacctctgcctcccagattcaagtgattctcctgcctcagcctcctgagtagttggcattacaggtgcctgccaccatgcccagctaatttttgtatttttttagtagagacagggtttcaccatgttggcctggctggtctggaactcctgacctcaggtggtcctcccgcctcagcctcccaaagtgctgggattacaggcatgagccaccatgcctggccaaaaacttttattattagcgacttgtgctaatcagaatattctgttccataattggtagttgtatttgagaattaggtagaattatctcttttcttttcatgtttttggtcttttcttttgagtttgtgggattgctgtgtttcataaaaaatggcacattcttcataatcctagttgatgaattgtttcacattttaaatgaatatcctgtaataaagtttgcttgtacacatacatttatttttccccctctaggttttcagtggttttcttttctttcaatctctaccctgatttctgtattcctacacacacggagttttttttttttttatttctaagcttagctgtcatcaaataaaggtaagctagaaaatcaaagccctgaatctttccatcagaaccaaaggaactcaacaagttctgaaggaaattgaagttgaagattgtgtatgtcataccaaccagtgacagagaattatttgaaattagcatcatatttgattttatacaaaagcaactactatggtagtgtgtgtgtgtatatataaaggataaaaaatgtttaggttagaatgattatgtctatatattgtatagatgtattccatacatatatacatattccatattgtatatattctatagagagaatattctaaatccttattttcaatcctttagaggaagctactaactctaagcaaacctcagaccagtctctaaaaatagctccctttggagaccctgaagccaaattaaatatctggcctttgaaattttgcctgttgagagcatggttacatgtaaaatggataaccttaggacagtacccgctctgttttttccccctcaagtcccctcttccactcattattttagttaattgtacttagtagaaaacagttaaatctgacctcctcacagactgacttctttccctctgtttcagccttgtctaaggcttatctgtttcagcatgtgggatctgagtttttttcctgttaaatggttgcgtgctcatctctcctcagttgtgttgactatcttgccccttaagaattttaatctacatggtggtccttctgttttttgtctcttattttcatttttgggtgatttgaaaatccatgcccactgtcaagtcaaacgtttcttctatcaacagttgttatcatttctgtatcctccatatcacgttggtcttttttaggttgggattttgatgagcaggcctgttccctcctatgtcatatgctatactgggttcactgtctacatttcaataaatgtgataaaataaccatcattttgttgaataagttggtgtattgctgctgttgttcctctggagacagttttctgcaggctacattaacaggcaatggaaatgcatgccaggctacatcctaacggttgtgtcttcccatcagaaaaagatccttttacccctccctgtcaaatgaaggcttagattttagagacaattccaaaatacagaaaatgaaagagaagaactgaaatcacagcatctgtgatttttctctatccttaatagtgaggcagcttcttagaggattttattgtaatatgttgataaaatgtttatagtcatccctttgcagtttgtttagaaagtagtttctaagcagcagttcctgcatcatctacagacttttagctagagaaaccacctttctttttgtcaagctgcaaaacaagtctgctcttttttatttagtttaacacctgatctttatagtgagggactaagttacatgatctttcttccaaaagaatatttctcagatttttgtgttctatagctttctgattaaattgccataataatataattacttattagtcacagggaactgtgactatttatttctaggagttcaagtgtacacaataataaactgtccctcataaaggggtaaggggtaatttcatagctgttgctgtggtagtggatttggatgcatctgactatggaaccagatctctgatcagaaatagttgagttgtatatacatttaaagctagggaacttaacatcacattatattgccttgtattgacaatcatctttccattatctttggataagtaagacatgctatgacagactatttggctgtctcaaagtcattgccttatatttttttcccaaaggaatttcagatcctgtttaatatttgctagttttgctaggtactgaaggcagaaagaggttgtagtagtatcttgtgaggaaggaaatcagtgtttcttatccattttccatatactgtcaatctgtccaaacagacttattatacagcaaaccgataaggagctttgttttcctctcgatatacttgcctgcacagcaccatgtgccactttggagagctctgtggtggagtttcaactctctggataaggtggaatagctgaaccattgtgcctccatagattttcacaaccctgaaagtaacagcagttgggaggatgaaagagggctatttcccacccaccccaaaagtcctaaagttcaaagacacagctggtctttgtctggtgtttcaatggagccaatgcatctggagcagcccagttactggagaggtaactattgcaggtacacttcctgttgttattcttggaagtattcatctaggtggcccttgcccttccctgtgaatcatctcctcaagtccttctacccttttgttggcctgctttgaacttcttgtctgttaacctcttttacaaagtaagacctctaagcataggataggaagtgctccaggtgtactctcacccacgctgtgtgaggattgttcaactatctggtttctgcatatttcagaagtgcagtgatacctaagttcttactttacttgatttcttctgtttctctaataactttctaaattatttctcttcatttacataatactcaatgctttacttttcttcattattctatttgatatcaagtcatagataagccgaagacatgttctcttctttttttaaggctattttctataagagcatgcggccacattctaagagattctctgaaatttcttctaaaattcaccgtcaatggatagggtttccttttgtagttttacctttcaaacttaccactgactcacattctttctttcatttcattgcaaccaagatttctaattgtgttctaaaaatcaaactgaactcttgtctttcctcaagagagaagggtatccccagtagagaggagtctagggaatgttgggagtgcttctctgaaacaacccaaccacatccaattctgtttcttttggagacggagtttcgctctgttgcccaggctggagtgcagtggcgcaatctcagctcactgcaagctccgcctcccaggttcacgccattctcctgcctcagtctcccgagtagctgggactacaggtgcccgccaccacgcctggctaattttttttgtatttttagtagagacggggtttcaccatgttagccaggatggtctcgatctcctgacctcatgatccgcccgcctcagcctcccaaagtgctgggattacaggcgtgagccaccgcgcccggccctccagttgtgtttctattcagggcactgcccaagtaaaatgcacatgagttatgatctgttgtagaaagtattacaatgaagcgcaaacattaaattaatcaatttcttgacctacattgtaatcaaaatagtacagttgactattgaacaacacagggattggggcactgacttcctgcacgtcaaaaatctgcatataacatatgatacccccaaaacctagcctactgttgactagaatccttactaataacagtagactaacatattttgcatgttatgtgtatcatatactgtgttacaataatgtaagttagaaaaaagaaaatattactaagaaaatcataagagaattttttttttgagatggagttttgctctggatgcccaggctggggtgcagtggcaccatcttggctcagtgcaacctctgcctcctgtgttcaagtgattctcctgcctcagcgttccaagtagctgggactacaggcatctgccaccatactggctaatttttgtatttttagtagagatggggtttcaccattttgattaggctggtctcgaactcctgacctcaggtgatccacccaccttggcctccaaaagtgctgggattacaggcataagtcaccgtgcctggcccaagaaaatgtatttactattcattaagtgaaagtggatcatcataaaggtcttcatcctccttgtcttcaccttactaggttaaggaggaagatgaggggttgttcttaccgtttcaggggtgtcagaggcagaagacaatccacgcagttcaaacctgtgttgtttaagggtcacctgtaatgtcaaatgtatctcctcctcaaggtagataacccaaagaagagtcttttaacaccagggcctatgccccactacacagggtgggtcaccagctgctccataatagcaacattaaccagcaagttaggacaagagaatgaaacaaccatatccaagtgaagcttcaaggaaacacaaggtaataatgattattatattcacatatggataaaagagcatgaatgacatccattgttgccaaagtttcttgtgagagcattttgtgctaagttatatgctgtcctctacattaggctgtgtatggagataaagaagccatataaccccctgtctagattttgaagacagatattcccctttgagagaatcgttgtagtgatagtagttttggaatgagtgtgtaactgtcttacatattgactttagatttatacatcttagttgtagggactgccatttatttcccttccatatgtattccagaggtcaataggtacttaataaataagaagtaaaaatgactattttcctaagcttttccagcattatttgatgataagttcattttttggtcataaactagctggcttcccattatatctcatgattaatatgaagtatgtatttgtgcaaaaaacattttgatagttcctaaacagatgccatttagtctcttgggattcaccccaataaagaggtattttcttagctctccctactttatccactattatttttgaagtttcctactctatcctgctctgtcctgtccttaagatgatattcttttacaaattgtgtgcatatcccgtggggggaaaatatactttcctccctcctctgataactgccccataataattagtccattcttccagatccactgtcttaggggctgcttgctctattatgtggtgtagatttctgtttcatcttgagggtcgtttttctacccccatcctttagctaccagctgcaaagactcttacatacacctcctaaactgcttcaaaaggaatctggttctcctggccccagtactgaccttgaccctctccccagtcctgagtggtcctggaaactcagtgtccccagcacctaattcatgctgatcctctgactttcttgcttggcctctggagagacagagagcacattctgaacactcctccttttgtgtcggcatctctatgaggtgctttggaaggactccagccaggcatggaagggctctttgataatatctgacgggtgggtaagaatttcgggcacctggccaagatacacattgcctgtaatcgttaactcagcctgtaaacagttcaaacgacactgagaggccgtcagttattacattagaagaagcctttcatctctcttgctcagaagccagggcgtccagcgttggcccccactgtggtgactggagccatggtactctgtgcacagccaccaaagcccaagacatgcagggacacacaatggaacctgctccaaatgactgactttcaaactttcagcattggagcaataactaaatcgttaatttccttttgttctgcacctggctgatgctggaaggaaaaaaatgtgttgggcggtgtggaatgggggtagtggtggagaggtgggatccctgaccaggaataaacaatggcaaaggaattatctggaattagaaatttaatttttcagctcaattttccagcacacactcatgtctgaaggctcatccctcaccctttttatttgtcccactgcttcacaatctttctaagtttggtcctcagtgtactccatatctccggttggcttcacaattactcagtattactaaaccctggtgcaaggcacaatgctgggccctggagagggcctgaaggagcataagataacaaacattcctgccctcaaggtgcttactaacggagcccttcagatactgtagatatgtactagagaactctaccttgagaatttataataagtgctaaataagatatacagtgagtttctatgggagtttacaatgagaaagaacagcagtgtggagaagagtgatcagggaaacttcattctgtgaaaaacaaaaagtttcagtcctttgtttaaaatttgcttttctttcatgtttctcatccattttcttttgcctttttcattaaattgctactttcgctaagcaatattgagtattctaggcacttagtaaacgggatcattaaacctcttttagaatttagctgaggagctagaatttgagtatgctggtatcaaaggatggtgcaggaaaaccaagtacaactgattgtaagcatcttaatttcagaagacccttttctgattactatttctaaagatgttcatatagttttaaggctactgttactgaaacagtgtagattaggccacaggttttaagtagcaggtgaaataaaatcctacactcactggtattcaaggtgagcatcgaagttgcaggttttactctttacaccagaatcccaagtgtaaagcagctagactcttttgctctagaaaacaatatcttaacatttgcctcactttcttcaactaaagaaaaatgatagggccacgtgacattcttctagaaaattttttttaaaaaaaggatctaccttatataacttgactggggcccttataacttattagttagaaagctctgatctcatgccttctgttttctttgttttgtattccattttgctcagctttcggggcaccatttcattccctttacatattctggatttggggtttgtctcgttcccaccttccacattttctttgctgattctgaatgtagctttggaggagcatggataaaataaaagagtgcagagcttgaggatgaggacatgctgccctgcaccccgtcatgtgctctgcttctgatttaccaactgcagagataagcagtgtatcctttctttcatctaagacgagtaatactttcttccatggaaaaagcagtagttcaatcttaaaaagaaattaggtcctttagaagaattgaagcactaaagcaaactaaatcaagttttgttaccattttgtccagcattgttgtttgttcaatggtacacaggacagtagttatttgaaagcatgtgttagatcatatttatgtagtagaattgtagaaatacagaatttataagatacaagaaagctttgaagcttctgcagatgtttcagatccactcaattcaatgccctggttaatactgaagtgatatgtaaatttaatattatggggaaataatggaagaagcccctgttcttctacctgaacatggagtctatcttttgggaaatgaccagttttgcatattggcctcccactctggtggttttcattctacatgtagtaaggaaactgcctagaattgttttggtccctgttgatcaacggttagcaaattttagcatatatcagaatcagtttcagaaggcttgtcactcaaactccaattcctatttcaaactacctttaagatttaaatgttcatctctcatttagtatatcaagactgacttaaattttccctactctagcttttttctaatttccccattttgttaatgcaacatcttttttccaattctccaagtttagaacttttaactcctccatttccttcatcctggtactccaatctgtcaagtactttcaacacttccttcataatttctgtaattaattccttctccttttaactattactaccagagttcaagctctgatcgtgcagtactagattactggaacagctctctaattgattttcctaccactagttttctcttcattgcactagtttactctgctattaaattgctctgcttacagtattgttttgataatgagatcccctgaagaatttaggatgattccttttttgcatatgagagcaagctctaactctcatcttggcatgcagtagcctttgtaatttgatcctacctcagctatccaagctatctttgcagatctattttttcagtcagacaagtcttcctgtaccctgaagacttgagagaaactgctcaagaaccttactttttctctcacctggctcctggtttcttctcaagtaagctcagaagtttgaaaaatccatttgacagatcccagtggactagatcctgtggctatttttttcctgtccaaattctgttgtctttaagggtgagcttaagatccatctccttgacaaatcctgtaggacctattggctttaccacacaatgtggcctttgatacaatgtcgttttgtaccaccatttactttgtgtatatgtcatctccccagtgagaatgtacctcctgggttggacctaacagttttgggaagaagataggtgctcatcaaatacttgccaagtaagaggccatatttcagacccattctgatgtacctgtgagggaaatctctgtgcatgcccatccagcattgtactcagtggtcacatgaagtgagtctctgtttcttgacaaggatcacttgggagccattgatatgccgtgtcacaaagggtttgggggaaactgtagcagctgtcattttagggagaaagatggctccagaaacaggtctgataatgtgcaggcaaggaatcaacttactgacagagagcaactctagtagttaggtatttggctaggaaaggggcttagcctctgaagtatttcaggtaggttttggcttagcaattacatatgctgctactttctgagttaagcctgcctaaaaacaaaagtatggcctgatgactgggtggttactcctataccctaagaactcatttataggcatctgcacagaggtacccacccgaacaaacattaagaagaagcaaaggaaagtgcctgaagcatagtcactgtgtcaacagaaatatcagataaggtggttttatggagggggtgtgtgtggtggggggaagagttgatgcacctgtggttggtgattaagaaacttggtgccacattatatggcaccatgaagccaccttatgtcccagccaccccatggtggctgatgtcatataattacccatttgctaactgggccaagaggaaatgtattggatgaaagccagagtaagatagttatatcttagctgagccatattcagaactattcggaactttttggatctgcttttgttttcagtgaagccattgtcattgtcaatctaatagtagttgacttttataggtgtcctgcactttgtttttttgttttttttttgaagatggagtctctctctgtcgcccaggctggagagcagtggcacagtcttggctcactgcaacctctgcctcccaggttcaagcgattctcctgattctcctgcctcagcctcttgagtacctgggattacaggcacctgccaccatgcccggctaatttttgtatttttagtagagatggggtttcaccatgttggccaggctggtctcgaacttctgacctcaagtgatctgcctgcctcggtcccccaaagtgctgggattacaggtgtgagccaccgcacccagccaggtgtcatgcactttggcgtacctatttctaagacaaatatgttctcatgtaaatgtattcaagtgtgttcccatggctcacacaagctgcccaattatgatatctcctcaagcaggaacagggtccagacaattccttttggctgaactaggactgaacttaatcccagactgactcagcttctctgttaacattgtttgaaattctgatatccctccagaggttgtttctaacgagtgcttagtgtgaagtacgaatcacaaagaaatggaccaaagtggacctgggagaccaaaagctcacgttttcaacattaatttagcacacatttattgactgccttttatgttagagcattgtgctatgcgggattataaagaaacccctgccctcaatttagtaagtgagagtataggccaggcatggtggctcacacctgtaatctcagcactttgggaggccaaggcaggaagatcacttgaggccagaagtttgagaccagtctgggcaacatagcaagaccccatctctgtttattaaaaaaaaaagaatataaagcaaaaggtgaaaattaccacacatagatacaaacgagatatttggggcatttcagatgaagaagaagagattcttcatggaagaggtagcatatgaacttgcccttgaaggatatataggattttaataagtcacagaacagaaataataggcattccaagagaatgtgagagaatagtgagtaatccaatttattttggacaagtagtatggtacattgaagaggtggggatgaaactgaaaaggtagaggagaagggaagaaacacatacttttgagtgattactatgtgcaggaactgctggtactttaaatatgttacttcattttatctccgcaatgatcttcttgcacggtgttgttgtttgttttgttttgtttttttacagagtctctctctgttgcccaggctggagtgcagtggcacaatctcagctcactgcaaccctccacttcttggggtcaagcgattctcctgcctcagcctcccaagtagctgggactaccagcgcgtaccaccaagcccggctaatttttgtatttttagtagagacagggtttcaccatattggccaggctggtctcgaactcctaaccttgtgatcctcccaccttggcctcccaaagtgctgggattacaggcatgagccaccacgcccggctgcatggtgttttttgttgttgttttttcgttttttgtttttttagggacaaggtcttgcacaggctggagtgcagtggcacagtcatagctcgctgtagcctcaacctcctgggctcaagcaatcctgcagcctcaacctcctgagtagctgggattacagacatgtgctagtgtgcccagctaatttttaaaaaatttttcatagagatggggtcttgctatgtttcccaggctggtcttgaacttgtgaactcaagtaattcacccattttggcctcccaaagttatgggattacaagcatgagccaccatgcccagcctccatttttaaaacgagacttagagagattaggttacccacagcttggaagagatagagttgaaatgcaaaaccgagttgaaatttaaaaccaacttatctgattccaaaaccagtacagagcaccgaggccttgatttgataggctatggagtttgaatttaattcagaagacagtggacagccactgatagtatttgaacagggcaatgataggatcagtgctgtgtctaggaagattgttcttgaaatgacagagagctttagaatggtgaaagactaaagactagttagaagtctgctgtaatggttccaactccagagacatagaaaagataggtctccaaagacaagtgatggcatagtctttgctcagccagagtctctaggaaaatggtggtgccgttaactgaaataggttaagttaagagaggttattggcttagggtggagtgcagggagaatatgatatttaggtttggtatatttaagtttgagatatcagtaggacttcaaataaataaagtctaacaagcattttgaagtatagaagatttgacttcagagaccaatttggaaatcataattaaagatactggagtgaataagaacctcagaagagaggtaatagagatcagagagtacatctttaggaaacatacatatttaaacaagaagaagaggaagaaaagtaagaggaagaggcaacaagtgaggacaatcagagaagtggaagaactagaatagtattatgtcatgagcaacacgtgaagagtcaagaagcgcgtatttattgggtcagaagtaatttagggctgtttgtcttgctgtagcatcagtccctttcttaggaaacaactgacaccattaagttcaaacacattcatttttctatttcaactctgttagggaggaaattcagcaatcaagaaaactgttttcctgttaaagatgtgtttggtagtcacatttttcatttaagctaatgagagctctcaattttactgccagcaaaagaaagcaacattttgaagtatttctctatgtcattggaggtttagttcccaagaaagctcttgttatgtccgtgcttctgcccttttactctgtgcttcttcctgtggtctgtcaagtctcccttcattagatttagtacctgaaaccgatgcccagaagccaggtcacaagcccaatatgcattgcattgtctcttcaagccttagttacctaatttgtggaacgggtggtactaataaagggagagtaaaatagctaatgaaggattataaagcactttgctaatataaaatgcaacatcaaagctgaataataatcttaatttagggtgaagggttccattagcagagtaaaaataaaaaggacaaagggtagtgttgctttgtaccttgataacagtgtacaaatcaaaagtgctgctattgatcctcattgccctgtgaactctcaacccaggaatttggctcccctccctaactctctaagtacttcccttacccactcagtgtggtgatggcacctccctgaatctcctgacaaatgcgaacaggaactcctattcatcagagccaacttgataactgagaagattcctctctcatttatcagcctttgattatctttttgtgtctcttactatttgcgcttagcaagaaaaataaagaggtttgaacaattaagaagtaacaaagagctcatagttcacaaagagcaagtcaaaggatgtctggaatatttgaacatacaactgcctttggcatgaggtggcctacatacattctcaggggcaggataggctggagagctgatcaagctgccgggaagctgaagcaaaggcagggtggtggaatcaaatgtctcttcaactgaagactttaaaacttgggctttagctgggcgcagtagctcacacctgtaatcccagcactttgggaggtcaagtcgggtagatcacttgaggtcaggagttcgagaccagcctgaccaacatggggaaaccccatctctactaaaagtacaaaaattagccaggcatggtggcacatgcctgtaatcccagctactcaggaggctgaggctggagaatcgcttgaacgcgggaggcggaggttgcagtgagccgagatcacgccattgcactccagcctgggcaacagaaaaaagaaaaaaacaccaaaatgcaaaaaacaaaaaaacttgggcttcagctgggtgcagtggctcatgcttataatcctagccctttgggaggctgaggcaggaggattgcttgaggccaggatttagaaaccagcctgggcaacacagggagaccctgtctttaccaaaaatagaaattaaaaacattaaccaggcttggtggtgtgctcctgtagtcccagccacttgggggttgctgaggtatgatcctcccaggtttgggcctgggaggtcgaggcaccagtgagctatgattacaccaccacactctagcctgggtgacagagtgagactctgtctcaaaaacaaagaaaaacaaacaaaaaaacttgggcttcagatacatcctcttttcaaataataaaggacgggggaaaaatgtaattcatctctcatcccaccaaaggtaagaaaaacccactcagaaaaaatatggaatattatccagagtgaactgattctaagctttcccagaacttttctgtgcagatctctgggccaagtcctcataaaattttggtagggactgaagttcactgcagacagctgacactatggcctgaagccagtggggagcaagagtttctttctgtcaatactgcagggattttttttaattgtttgtaatagtctctaaatggcttctctcaaaaaataacttaacaaatctgggagagagactgaagggcccaaaatgacaagagagtacttcaaagccatacagcaagagcaagttagtccatcattccacattaccccagtgtttatgtgctgtgctctgtgcattcccatgccctgtgtgttgtctaacaaatggccttaagaccctgtgcattgagcacgtgtatacactgctgtagcctacaggcaggtgttactctcctgagaccgggactcgttcctttggggcagaaggctgttgctttcttccccattcagggttatgcataactcagcagtacactgatactgagaggagacaataaaagcataacgggatgggttattaaacaggaagcttctccagaaagaagtgagttttgttcagggttgtggaggagatctaggcatgatggtgaacaggaaagaagagaactctgccttgtgatgaggtcaagatactctaaagctgactttgaaactgaaacttacagggagtatacagaaagtttctgaagagaaagcagaaatctgaaaataatcatatcctgataaaatgacagagcaaccaccaaatatattttacctcacatctgtttattaaaacagatgattcaacatgcatttttcttaatatctactgtgtgcatggcatgatgttaagtgatgaataagacctagtccctgacctcaaggagctcagattctactttgcaggaaggaggaaagaactaatgttttattgcactaagaatcaggcattctgctggaggaaataggtaagagagtgggtcacaatgcagcattgacccacagtaagaggtaagtgtcatttaagaattttgtatagatggcttcaggggaatatatgagggaaagtatttagtttctggggactgagggctggtcaaaggattggagaagggcccaatttgaactggcatggggagtcaagggcaaaaagaggtagagagctataggattggagttctcacagtctttggatcacagggggataggagaggtgccattttttttctctatagaaccaaggaaatagggaaacgtccatgggaagagaaaggaaaaataatttggcagagaaccaagctattttcccatcatatgttttctgtaaaagacttcttaggagctaagacagtgtttttctgctttcattctctttaatgcctagaattctgccataaaaggctatttatatatcttactttttagttcctaggagcgcaagagatgctactattgggaatttctaaaatattcagaggatggaaataccagctggcaccaatgctgagatatacaggcaccatccatagagacccagtgaaattctgagccccaaatggcaatccctcccaggctctcccagagccatctcactttttcttttatcccctgcctggaaggctacactgtgggtgggaataaaaatccactctcctgttgcatctaggcagctgccagcagtctgtttgccttgttctttgctggcaaatcattaaacagtccccccaaagcaggcctcttccctagggccaccgcatggacaaagattcagagctgtggtcaaagggctgtcagcagtcaggctggagcccttgggctatctccaacacaagcccttcctggctgttgcctcttctgaacagaagccttcttggcctaatgtcaaccccccaatggcttctgaggagagactctgggcatctgagttggctggtggcttgaataattttgtccttttcctcctgatgttatttctgagtacaactacccctatgatcctttattgttttctttattgaaccccagacccatcctccataattttgccactttgcaatgtaaatacaatattgtgtgttactgcccaggatctggggactgggactagccgagcaagcttcatagcttcattccatccccacttgcattgtgccaatgcaaatctgagcatagaagatttcattgagccagcccatttggagacagtatctgccctcaaagggcttctaagccccagggcaagccagttgtggaagacagcagtatggagcagagtttgcaggacaccttgaaatccctacagcctctgagcaggagactaagcctgaaagacctggactatgtgtgaagtaaccatgttaatgaagctatttcgcactcttgcactgcaatcaccaaacttagcaatgctcaagtagctctgccggtagtccagatgggcctctggcgtatttaaataaatgatctggtttccttaagtttcatttctttggtgtttttcacagggactgtctggctttagtctttggccttttaagcattgaaatcttaaataattactcaaaaataaacacttatctgattctagtaggttttcagattcctgccatctctggtgtgagcttggctggaacaggaacagcaaaatcaaataataaagcaaactgtgtcaaggctgtttgcaagtagcacattgggttaggtgtgagagttcagttaactactttgttgtggcaagagttaagaccatgcctcagaagggccctagacaaagcctctatagaccttatcctgggcctgtgggaattagatattacccctagcaatacttgccatctgtgtcaagacctcggcctttctgcagaggacttctttggataagacctagctaaacaagggggctcagtggtactccttataagatggaggtcagtgagggtgacaaagatctttcctgggacagtggtcagaactcagctgacttcccagaactaattagtatgatttttggatggttgagccctgagttcctcacctggtggagaaaaggagtccagaacacatgactgggttatcttttaaggtcttgatcttcacaggcctcagaacttggtattctatttcatggccttgcttctaaagatccctgatgtaactaaaatgatatttgacgggctccctcttctttgcttctaacttcatgagtagctttctagtacctttgtagttagaggtcattctgactgagtcaggtcaaaccctgtttccatgtgagaatataatgatataaaagttctacttcttgggtggctgggatttttctcctgtctatgattagtgccaaatatactttcttctctgatatcactttatttcaaaagcagctcagataattagctcttgttctccttaccttcttccatttgcttacgagtgcactcctgacctgtgaatcaccatagaaagatgccaggcagagtgtggggtcaggagaaccccaccatgggggccgttttcatgtaaagaagcctagttgcatcatggagctccagcacagtctgaaatgaggataggtgaatttggaaattgaagaatggcgtctgtaatgtggggtgaaggagtaaggaaaatggcagtctggctgaatgaccattacttgggtctgagcttctgtgacctctaatttcaggacacacctttctcatcctaaagcaacagggacttttcactgggaaagtgtctctgagcagcgtctgggtctggctgcctttgttgtggctaggagaggagatgagataaaccgtagaggagaggaaggaagccgaggctgggaggcagagcacaaggagcagacagatcctgcttctgtcttgttaagaatgattcaagtttgaaaattctagaaatggggaccctgaagccttccactgtgatcccaggcattatattacagtactcacctaatgcttaccatgccacagaaaagcctccccagcgtgcatacccggaggcagtgtggggttgaatttaggggacctcaacctcctttaactgggtgttgactaggttgactaactttaactaggtgggcaatctgtaacttgagtcttgctttcttcagctgtaaaagacaaattttgaaggtccattatgggtgtgaaccaggctcagctgttagcaatttacatctcttctataaactacgtggcaactggattcaaatcaagttttattcattctttcaccaaacactaagggcctatgatatgcagagcccccgactggagtttcagtgagctcagtttttccctcagtttttgccaccctgcttcctattagattctggaacatcatttcagttctatcttgtcagctctttcgctcaccagcacccctgttcccccaaggaggtttcctgaatcaagtgagaaatcatggaggcctcttcatccatcccctgctagtgtgcactcccatcagatggcccgaggttatgcttctccctccccaccaacattatttacttttgtagcttaaaaaattatacgatgaagcaggaatacacttttctggtaaaataatttttaaaaaatagatagcatgcttgtaatcccagcactttgggaggcctaggcaggaggatcacttgagcccaggagttcaagaccagcttgggcaatatggtgaaaccttgtctctacaaaaaatacaaaaattagccaggctgctgaggcacacctatagtcccagcacctcaggaggctgaggcaggaggattgcttgagcccaggaggttgaggctgcagtgagctgagactgtaccactgcactccagcttgggtgacagagcaagaccctatctcaaaaataaatagagtaaaataaaataaaataaagagaaactcctctcgacaattccccagcctcccaacttgattcgtggaaactcagtcatctcagagagatagtgacaagtttatgtaaggttttgaaagaggtcttgaggttcccaaatctaagcctgaacaatcaccattaggatctaacctgtagatgtgagcattgactcccttcaatacaaggcaaggtgaccaagctgggcctcagtggtgggcctattctggtgccgggatccggaagaagcaacttcaggccaacctgtttttttcccacccccatatctgcaggagctttactttatgatgccggtgtgtcctcctacctaagataaaagttcaggtaatggaggttgtgcaggaaaggatgattgtaaaatctgaaaagaggaaatggggagaatgatgcctttgatgcctggccaatgttcttgattacaaaggcaaaattgtagcaagcagtaaagttacctgtccaaggcctggttgaaggtctgtacgtggaatcagagaactaagagacaattgcagcagaggtcggtggtgggggcaggagggggtgggtgggtgggtggggaggagagttcctgggaaacaggagacagtgaagaattgcttgcagaagcacacacccaaagaggaggagatgccatggataaggggagaccagcattaagttccaggcccagttgagccctgaaatgccctttgtgaggaggtaatgagatcacatggcttccttcatgggaaggaggcaggctgagaactggaagagcttgttcagtggggtttggagggctgagaacaggagggaagtgactgtggataatgagctgtcccagaatgcgccttgcagaacactggcattcagaagcactgttgattaccaaagaacgggggaggggttcagaaaaggccttgtcccttccaggaataagaagggactttattatagatgcagtaataaaaacagctgccattaagtgagcacttactaagtgtcaggctttttgctaggcactgatatccattatctcctgtctacacaaagcattcttgttcccattccaaagacgagcaatatgaggctcagaaagattaacatgcccaaggtcacacaggtaaatgatggggtcagaatctgaactctaggtctgtcttgggagggaggggaaaaaatcagaacaaataagttaaggaggacacagggagaatagactcaggaatatgaaatacaacacacaccaccgaaggacagttcacatgtctttacacagggggtataaaatatgtatgcaaagctgaattctgagtcagaatgacccaactcgtgcttgaaagcaagtgcctcttaatttgcccctcatggcagcctgtgagacagtggtgtcctaactcctggcctttgaggaagtcaaattcaccaagtttccatgagccctccacagccacacccttctcaaatcaggcaagctcatttctcttgaccctcccctggtgtcactgaggggacaggtggcccactgtagaaatcgtgtttgcatcttcatgattaggagaccttgcattccaaggagacagatgtatttgcatctgttttctcaagagcccgcttcctggctgaaaattccttggaggaagggcaaagacagcccctgtgttatacccagggaatgccaatgctgtctttcttgctaggtgctgaactgagtcctagttcaaatggctattatttgtttttaatttgagaatatttgaaaagctctcattgtaaaagagtcaagccatacaaaagtataatgagtatgattgtcataccacagatataattgtactagaaagatcatgttactttatttatttattttttttatcaaatctaacaccaaggtcctatcccattagctgcatagacatttgttttcaagggcacttctcctcatagagtagcacaaaagtcccagagttttatgaaaaccaagatatccaagggacccctctgatattcatccatgctggccaccacagatatgtttcttgtccaaacacaggcattcccttgaaatccacgcaggcacatcatctctcccaggggccagcctcctggggtctagtactcagtccttctccagggacccaccgcttctggggcacaggctgcagcttcccactactcagcatggctccaggcccctcacactggctccagacacctccttcctgccctcctggttctgagactttgacccctcccttcaccacaggcccttctgccttcaggacactcacacttcctcagtgagttcagtttttctgcaaaagccaggaagggagaactttaaacaacatttgcttttggcaaatgcccctaaggcaaggaaatagaaggtgaagccatcttcttggaagggaaggagggaaaagacatggaacaaaatataaataactgtcgttcttttttattcttctacaacagcaaaaaacaaaactcaaatctcatgtattatcttctgatcaaagtattcaaagcaaaacaccaaagtccctctctactaccccctctctaattcctctcccagagcaaccattataggatttgggtgtgctctgtcttgtcttcatagttaactatcgtcaattatctggttatagacttccaatatttaatcaacaaatattgattgagtgcccacaaagtaacaggcagtggggggcaggctagactcagtcatcatctggagaagagagggaagtaagccgacaattacaataccgtggggtaatgtatgattagggaaatgccggacagagcagcaagtgccaaaggtgttcagggaaatgaaacaagttattatttctggaacataggtcgcaaggtgggaagagatataggatgggaatgttaagccatgaggcagggcccagaccaggcagagccttttcagctatgtttaagagtacagactttatttcaggagctatgaggagccttgtaagagctgcaagtagaagagtaacgtgctcaagttagcattttagaccactttggctgcaatatagagaacgaatgggatgaagtgaccctagggagtaggttatttcggtaaatagggttggcagtgatggtggcctgtattacaatagcgatagtgagaatggaagaaagaataaaataagacaaatatttaggaggtagaattgttagaatttggcgattgattggatattggtggttagagtgggggtgaaggagatggaggctaggaggacagcatcttgcttgggtaatagatggatgatggttccaatcccagagacagcaaacactggaggagcagttttggggatagaatgagttcagtcttgagcatgctgagtttgaggtgttctacttaagattattaaggtagaaacgtccagggttagacataagggtctggagctcaagagaagaccaaactgtacatatgtaatcactgacctctgtgtgggcaccgtagccatgggattggctgctgtcacccagagaagtcatcaagagtgaaaagagggggccagacacggtggctcatgcctgtaatcccagcactgtaggaggccgaggcaggcagatcatgaggtcaggagttcaagaccaacctggccaacatagtgaaaccccatctctactaaaaatacaaaaattagccagacatggtggcgggcgcctgtagtcccagctacttgggaggctgaggcaggagaattgcttgaacccaggaggtggaggttgcagcaagccaagattgcaccactgcactccagcctgggtgacacagcgagactctgtctcaaaaaaaaaaaaaaaagaagagtgaaaagagaggagggtctaagaatcccgggggtcaccatcaacattttagggacttgtatttgggtccttatgctttagtaagataaattttcttagtaaatgagttcggggaaggtatcatgttttcaaaataaaatgtaaattgttcttaaatatttttttaaccttatcctactactactttcctttttttttctaatctctaccacttactagctgtgtaatcttgggcatgttatttaaccttttagtgcctcagtttcctcatctttaaaatgggaacaataacaatctctacctgatagtgttgttatgaggatgaaaagagttaatatgaaaaagtgcatagaacaatcactggcccacagtatttacccaataaatataaactgtactgtccccatcctgactatcattagcatggagatggatggagggttgctggatggagggttcatttggagctccatggctccgacaatggagtcaggcagagttgagttcaaatcttgtgtgaccttgatttctctcagcctcaagcttctcttctttaagtggctatgataggggtagtggggagatggagatggttaatgggttttaaaaaaaaagttaaaatgaatgaataaggcctagtatttgatagtacaatggggtgactatagtcaacaataattttattgtacatttaaaaataactaaaagagtataattgaattgtttgtaatacaagggattaatgcttgaggagatggatattccattctccatgatgtgattattacacattgcatgcctatatcaaaacatatcatgtatcccataaatatatacacctactatgtgcacataaaaattaaataattgtttttaaaaatggctataacacctaccttatggtgaaataatgtctaaaagctctggcacacaagaggcctttattgatgtttaatttccttccattccttcttccatagttgttaattcggaaccaggcaagtttggtggctcataccaggttttttttcccttccaccttgtcagaggtatcctacaatgcagcactgagctgtagatgctggttccctgttcaaacctggggaagagtgctgtttaaatatctgcagacacactgtaggaacttctccaaagtgactttcctctcccaggcgaccctctggtcagtgagcggcatcttggagtcatcaggagaaggctggaccatgtggggagggtcgaggagcaagcagagcagaaccttctgtggctgcgatttgtccttcctcagggaaggcctccatcttctgctctggtggagcagctgccttcagattccccaccacaccagagtctcctccacagtcttcagagaaattggtctccagtgcaaatctgtggtctcagctctgtggcctgactcttgcagatccttccagccttatgtcctgccttccctttcgtgccagacctcactgcccacagtctacctcagcctcgtgctaggcctctgttccttggtgcagtggcttcctctgccaggaatgtggctccccaaccccgctccctttcattggtccctgaggtgaacacatacctagttagccttccaggtagctctccagtcacctcttgtgaaaactgctctgcttcccatatgtattgttagctgcccctctttgtgccctcccataggccccttgcattgtaacatcacgatgtgtttgcatgcttgtcttttgagctgctttaaggcaaggagcctctcttactcatcattagctcctcactgcattggacagagcctgacaccaagggggccttccgtgctggcagaacaaagaaatgaatggatgcatggacagatagagagactaatgcagcttgttgagacaggggctacagcttcactgatgtaagaacaactccaccctcatgccccagcctttttcttggggcaggggcacatgataacctttctcccacactaaaccttgctcactaccagactagtaggccttaaactctgggagcaagaatggaactccttcctatctcaacaccccctgcccagagattttgattcaaagcaaggtagtagatagttattgagaacctactatgttcaagggaccgcggtgacacagtgagaggaaatagcctgaaagagctttcagaaagtgtgcttttaaatccatcattgacattatcttcataaacatctttataaattcaagattctctgtggttcctctgatggttctttctggaagtccttcagacatcaacagtagtagagggggaagtgtgggcagctctctaataagaaatctctttcttgccaggatatgtggggtttctactatataggagtccctggaccataggattattcagggccaaataagtcatactttgttctcattgcactctgacattttgtttagggaaaattagattcaaatgggtgtacaaatcgctgtgaatgagaagagagagtaaggtggtctcacccctttgatgaggagagcctcagatttctgtcagcacgttctcctttagtcattgttcagcaccagctgggctcagaggcacagggtcttggacaggatctgcccttagagcagatgggctgggctggctccacctccacggcatcattcctgggaccagggtgagctgtcaaagcttatgtcttagccaagcctcattgcaagatagtctcacctctctgtcaacaccatgcttgatcccaggatgggtacagggcagaggcaaaaaaggggctagtgagagaagcaaggtagcaccgagtgagatgacccagcctcctgagaaatgggaatctacagggcaacagttgcctgggggcatcccgaggaggcaggaggcaccagcagcatccagcactgcccatgggcattctgaaagcactgatgcaggcacacatggatattctcttagcctggggcttggggagcaggtagaaggatcaggaggtagagaggctggggccaggagaggagccctctgcgtctggccagtttagagaagtaggattgttggagttgaaggttgttagagttgctttgcagcaagctcttcatttaggtcccctctgggacaccctctccctcctatctgcctccactacctgtgtccttggccccagcatcctgaagtgacaaacagtggtcactagcttactaagaggcaatccaatcataaggcctactcttttacagcaccaagagacctgcctggtacctccctagaaaaatggagaggtatatggctctcacagctcactcctgctgcctaaagcctccctaacccaagtctgtctctctctgcagtcccacccgctgtacctgtgcaatgccagtgatgacgacaatctggagcctggattcatcagcatcgtcaagctggagagtcctcgacgggccccccgcccctgcctgtcactggctagcaaggtagactcacacttcgccctacacacacccggagcttcacccagctctgggctgtgagaagaccctgtgctctcttgtccccatgtttcctaagagtgatgtacctgattcccttgggtttccctaacccatgactggtctgagagaagtggaaattcacacctctgttttttctcctccgactagcaccagcaggactttttgaccttcatcccagcatgctccccatcccacctccttcccatcacttgggagttcctgagtcccttcccctgctctgcaccagagcaaagaaggggtcaattgaagggatttccatcttttagaaacatacactgagcactgtgcaagaacagcagaaatagaaaccattgccccacccttaaaaagttcacacttttcccctgaggttgcaaactggtggcccataagctgggtttggcttgcagacatgttgtgtttaaccctcacagcgacttttcaatgtgtatattaattgccacatttaaaaattaaaaatgtttatataaaagctgagattttcactaggcgtggtggcgcacgcctataatcccagcactttgggaggccgaggtgggtggatcacgaggtcaggagatcgagaccatcctggctaacacagtgaaaccccgtctctactaaaaatacaaaaaattagccaggcgtggtggcacatgcctgtaatcccagctactcaggaggctgaggcaggagaatggtgtgaacccaggaggtggagcttgcagtgagccgagatcgtgccactgcactccagcctgggtgacagagcgggactttgtctcaaaaaaaaaaaaaaaaaaaaaaaaaactcagattttcagcttctttagaagaaacctgcaaagcacattgctgcaggccatggtttgtaggagctgggctggggctgccccttttccacagctgtgggccttctcttttgctatgctccaccctgacctgctacctcacaggacctttagacctttgcctgtgactgctgctttaactaacaatagcagttactgttttctatgtgcttacaatgtgccatgtggacatgggacagattctttgtatgtatgatctcattcacttttcaggacaatcaggaaaggtaggcattattattcttcatttgatgtatgagacaagtgaagatcagaaaagtcaggtaacttgctggatgacacaattaggaaggggtggagctgaactttgaatccaaccctgtctgtttctcaaaactaggcttaatctatctgtggcctcccttctagctggaaaactgaacatacgtgtggagtgtagtcagattgtgtgtggcacacacgggtatgcccccaagggtggtgagagaggagagtgacactcccggcctttgtgttagcttgctgtctcaggcccagatcccttgtggatatcctcgttctcctgggcacaaggaaacagcctgggttcttacctcatcccatggcaggcagggatgtgggcaggattctgaatgtgggtgaagatattcacctggcctggccgtgctgacaaggaaggggactccagagatggtgggaagcagggggtcaggatgcacttggaggagctggggagtgtggcatctctgcaaggctgtgagccttcatggcagcagagttgttaggctgcagctgcctgccctacttctggatgtttcatttctctttccttacaaaatatgggcaaatgtcactcatttattcatttggtaaacaagttcccagtgcctgtactgcattacatagtgagtgtgtgtgtgtgtgcgtgtgtgtgtgtgtgtgtgtgtgtatgagagagagagatggggaagaaggattccgagaagctttgctgctattggtgggagctgggctggggctgccccctttccacagctgtgggccttctcttttgcctgttgcaccctggcctgctacctcacaggacctctagacctttgcctgtgactcctatgagtctttgagctacctgcaatatttcagaggttccacgggcttacctcaagtacttggttttgttttggttggaattctgttagttcaacatgttaatacaagttatctcatgagaaaataaattgtaagtaataaatatagttagtttggtagaacatctgtttttcttttttctttttttttttttttgagacagagtcttgctctgttgcccaggctggagtgcagtggctccatctcggctcactgcaacctctgcctcccaggttcaagtgattctcctgcctcagcctcctgagtagctgggatttcagttatgtgccaccatacccagctaattttttttttttttaacgagatggagtctcgctctgttgcccaggctggagtgcagtggcgtggtctcagctcactgcaacctccgcctccagggttcaagcaattctctacctcagcctcccaagtagctgggattacaggtgcccaccaccacgcctggctaatttttgtatttttagtagagacagggtttcaccatgttggccaggctggtctcaaactcctgacctccagagttctgcctgcctcggcctcccaaaatgctgggattacaggcatgagccactgcacccagccgaacatctgtttttcttaaaatgtgactcatgagaggtctaagggaaagatggggtcttaggggagggagagtttggaaaccactgacccctgcagctctgctctctgctttggcttttcctgttggtgtcaatggtgttgtcaccaatgacagagctggggctctcaagccagatagccctgggcttgcagcctgactcctccactgcccctcagtgtgacctggacttttttagctcacctctctaagccagcctctatttcctcatctgtaaaaggggaataataatgggacttgtaagtagttaggaggatttaatgagacagtacagatggaagtttttagccccatgccacgtacatggtaaccactcaataaatgattgcaattatcattactatcatcatcactggcatcatcattccgtgcttttgtagttaacaaggttgcggtatttttccttccatttgttatctcgcttattcttttctgaaaccctcaccataattcttctggaggcttccattcttgtcaccaccccactatcccctccaccctctgtccagtcacccagattggtttctgtttctttattagcagctccacagccatcctggtgataagccagagccttatcacctcatgcctgaactagtgcagtggccttttgcctgctagaaggagctagatctggagaaaagcagatgggtgcaagccctgcctctcttaccatggaggccactacctggtagtaaagaacaggcaatctgaaggctgaggtcctgggtgcaaattctgcctccactgcttctcagttggtgaccctgggcaaattattcagttcctctgagcctcagtttcccacctcaaaagtggggctgatgactatcttatagagttttgaggagtaaatgaaatcacatgtcggaaacacatagtattaataatagttgatataaggaccaggtgtggtggctcataccaggtgtggtaatcccagcactttcagaggctgaggcaggtggatcacgaggtcaggagtttaagaccagcctggccaacatggtgaaacctcatctctactaaaaatacaaaaattagccaggcgtggtggcacgcacctgtagtcccagctactgaggaggctgagacaggagaatcgcttgaacccaggaggcggcagttgcagtgagccgagatcacaccacacaccactgcactctagcctggtgacagagcgagactccgtctcaaaaaaaaaaaaaaaaaaaattagccgggccttgtggtgtatgcctgtaatcccagctactcaggaggctgaggcaggagaatctcttgaacccgggaggcggaaactgcagtgagctgagattgcgcccctgcactccagcctgggcaacagagtgagactctgtctcaaaaataataattataattataatagttgatataataataactaatgcttaagcaacaccccgtgccaggcactattataaatgctttgtgtggattcgtttatgtagtcctcataacaaccctatggactaggtcctgttattatcccagtttacagaaaaaaacaacagacacagagtagtgaagtgacttgacccaagtctcacagctaatagttggtatcagagccaggattcacccctaggcaatctgggcactggatctcaataaaggttatattccttctccttcctttcacccttaactttcaagcccagaggaatcccacctttgctactgaatctttcctgaccagcccaggcccagccagcccagtaggagcagaaatccctccctgggggcatgcctccagagggtagggtgtctgtgcatgctttcaacaccatcttctgctaagtccaggtttcagggacgcacctggtgcgtggaggggagaggctgaaggtccttcctgtccccacccctacctcaaagtaagcagcctcacttttatctgctttctatattgaacatttgtgccagattgtgtgtatgtgtgttggtggaggggatagtagaggggagagccttctggagtgaaaaaaggtctggaagcttccgtttctattcctttgtgctttagaatattatcagcgttatagcttcatgtatgtgccttgtctccacaactatattatgagctgttttggagggcctggccttctatggcttggtgccctgggcacggtaggtgcttcatttttgatgagcagaagatatacagggactcttgtctggagaagaaaatctaaggcccagagaaatgcagcagctgaccagtgagtcctgcaagtaagaggcagaattgcaactcactctcattgctctctctgtaatggctcctgttgctagaggctgtggcagccttgcctgctgcccctagggctggccaactctgaagcttccaaagagctctttggattctttctaaaactgccttcctgtcctgagggcctgcctatcctctctctgctttccaaattccagtacccaaataagtacttttttcctttttgcctccacttactttcttgggggcaggtggacaagaggcatagatagccctagattggactgctatctgtccccaaatcttgctttttattcctagaattctggacacagggactcactgtctgaaagtcctgtttgttttcccctgttggccagtgctctgggctctttgatcacttttacaactttgtaattatgggctgtaatgggctggagtgtttgaatgtcacagtaattgccttccactgttcctaccccaattcttcaaagagagaggggaggggaaataacaaaatctccaaagaagaaagtctttgcccttcctcatgctcttccaggccagggtgggtccagggtcttgttctaggggtgtgaaaactgaggcctgggagtcccaattctgtgactactggggtgacctctcctgtccttggccaaatccctggaataggagatcaccagtagggttccctaccagggattccttttcccctggtacttctcccttacccttgttaggagggttctgaagattggaaagtctctacctgcctggagtagcttagatgggaggaagtgagtagggaagatggaagccatgaacctctcaactccttcagcacttccattctggaattgactggtcctgtgaatttctagtcaattagcctggtaagcctgggccctaggctgggcctagctcctgggggaggaaggaaagttaccttcctgaccaaaacagggccccgcttgagtgtctcctctgcctgcaggcagtgggttctgagtggccccctgggccttgctgctgtctggggagtggagaacagagagctggagcaaggaaaggagctgctcccagcctgcctggcaggagacctgccctgacaggctctccctgggaagacaggcagagatcaaagtgctgagcctgtgagtaagtcccagcgctggctcttcttgctgccaccactacttgcaggagggttaactccttcaatgcctgtgggaagaccccagagactttgggggtgagggggggcggtgcccagggatgtaaaatcacagcctgatgccattagaagatgaacctttgccctagggaggaaggctggagggtggctgtgctaggccgggaggccccaggccaagcccaggagcagctcctcacagtgcctgttagttgtttgctgttgtgcctcccgcctcccccgacctttagctcttatctccctttccttactcccctccctacacacaccccctggattcctgctttttgttctctttctggcactgctatctgttctgcctggttggctagattctgcttcctcaagctgactcttggagcccttggtgaacatgcacgtgtgcatactcaccatatgggactagccccttgaatccctccccacttttgtctctaatgccaccctaagggaggggacgaaaggataaaccactggacaaggactcctctaagtccttgaattggagccagagaaagacttggcaaagtagagtgtggcaaggagagggagcccatgagatgagctgagacaggggctttgtgatggtggccttgcgtgagagtggcgtcccaggctcttagacctttgcctgagctggggagatgccctgcaggcaggactgggccctggaaagcccagctccctctgaaggagagctctacttctctgctgtccccttcttcctctctcttctccttctaaggggtgcaggtccctcctactcttcgtgctcatacctcttagtgaaggcaggctgattgtaccctgagggcaggagctgtgtcttatttgtctttcatcctagagccaggtccaccacctggcaccctgtaaaccccccttaagggtttgttccattacaaaaggaaaagctagatattatcccttgaaggcagtggggacctgagtgagctcaggaggcagaagaggagatcttagacccagtgaccccttgcataggtagatgtgagtgtgcaaagatgtgctgtgggcataatcctaggaagggatagatgtgtgaggggtgaggctagcctgtgggtgggctctgtccttccctgacctcagcccaacctctactgtgtgcctctgcaggctcggatggcgggtgagcgaggagccagtgctgtcctctttgacatcactgaggatcgagctgctgctgagcaggtacccagggacatttgcgtgttcaaggtgggggctggatggaggaagataaagctctcaggggagagggaagggcagggagaagtcacagcagccctgtgggcactttccccctgtagctgcagcagccgctggggctgacctggccagtggtgttgatctggggtaatgacgctgagaagctgatggagtttgtgtacaagaaccaaaaggcccatgtgaggattgagctgaaggagcccccggcctgggtaagcacactagacctccagaccttgccctgcacttagccctactttgtcctgtggcaactcccaccaaaagcccttagactcctggagctgcgagagatcctggaaaccctctagtccaacttcatccatcagctgtgtgcctctgggcaagttttcccccgtctttgggcctcacctacagaatgaacagatcaggacagatgagttctaaagttctttacagctctgtggcttcatggcatggaatagcagagctagaatgaaaccctggtcccctgatccatgacccctgattggggcttctctactggccaagaacctcatccagcggctcactggcaagaaactcccaccttgcagaggggtccctttctcttttttccccaagcacatgggttttgagatagtacttctcccagtgacatctggaagatcctctctgagtgcccttgggcagggagggcccacctaatcccacttgcaggttcctctccatcccctcagatggaggactcaagggaacctccagttagctatgtgcctcccgggctcctgtgtttcctcccgaattgacccagctcatcccggaagtatgaccctttccctctctgctcactccccagccagattatgatgtgtggatcctaatgacagtggtgggcaccatctttgtgatcatcctggcttcggtgctgcgcatccggtgccgcccccgccacagcaggccggtgagcagtgtggggtctttggcggcggtgaacgtgtgcgtgtgtgtgggtgggtggttagggagaaggaaggagtacgtgaagaaggcacctttatacctatggaaccatttacatcaaaataccccagcgtctgtctttgttgatttccagcagcctctcctcatattactcatccattcaacaaatacaccaagctctattatgtgtcaggcactgttccaggtgctgagggtagtacagtgaacaagatgacaaaaaactcctaccctcaaagagcttttttattctagagggaaaaaacagacaataaacagactaaataagtaaaatctataatgttttagatggtgatatgtactacggagaaaaaatgataatgctgatagcaaagtggggagggagggaatgcaagggaacaaggtttttttttgtttgtttgtttgtttgtttgttttgagacagagtcttgctctgtcgcccagggtggaatgcagtggcgtgatctcggctcactgcaatctctgcctcctgggttcaagcaattctcctgcctcagtctcgcgagtagctgggagctactaatttttgtatttttagtaaaaattaacagggttaatttttaaaagcaagtccagagaaggccacattgagaagatggcattgcagcaaagaccctaaatgggagagggagtgatctgtgcaggtatctgaggagaaagggatctaggcagagagaacagtaaatgcaaaggccttaaggcagaaatgtgtctagtgtatctgaggaacagcatgaaggctgtggctggaacagagtgagacggcagagtagctggtgggggccccgttgtattggactgttgaggccatttgttttttactgtgggtgaaacaggagccactggagtgttgtgagagaaagggcatcacgatctgactgaagttttaatatgatcattcctgctgttgtaatgagaatagactacagggaggcaaagctggaaacagagaaaccatctaagaggctattgcaggaatccaggtgacagtaatggtagcttggattaggaaggcggcagttaaaatggtgagcaatagttaggctctgggtatattttgaaggcaaagccaacagatttagtaatggattgattgtgggatatgagaggactcaaggacggcaccaagatttttggcctgagcaattaagagaatggaattgccatttgctataatggggaagacggggaagacaggtatgtggttggagatgaacccatggttaataagatgaggcctataagtttgaaatgcttattagatatccaagttgaaatgtcaagcagcggttggataaaaagtttctctcatgggtcatcaaaggaagaaaagctaatggtataagcaggtgggtggactgggagagcttggcatgcttggcagagccacatatgagctccgaggagacgaactcctaaggatgttcaactggccatgtgatctacctgagtgactgggaacggagtccaagcttgggtccagagagggagggaaggggagcccatgccccaatctgagccccattcctcttcccaggatccgcttcagcagagaacagcctgggccatcagccagctggccaccaggaggtaccaggccagctgcaggcaggcccggggtgagtggccagactcagggagcagctgcagctcagcccctgtgtgtgccatctgtctggaggagttctctgaggggcaggtaaggcaggtcttgtggttcacctccatgaccagactggggagattgaagctgggggaggggtgggcaggcctaggggctggtatgggtaccctggctacatctgtttcccatgtgtcctgcatgaggcagagatcagggaccagcctgaagtttggtcacttttctgaccttccagtgaaagagcactattgtttgttgagagtgtaccacgtgccaggctgcagtggtgctttggatgcattatctcattttagacccatggcaatgaagggtggggttagattcatttttttatcttcattttacagcagaaaactgtctgttaagaaagttgcccaacgtcatgcagctaagtgcaaaatccaggtctatgtgatgccaaagctcataccattcctattctactgtgaggtcttttacaagtagataatagcaaggagaggcctaagggagttgggggatgtcctgattcctggcaattcctatggctacagaagcctttggtttggaccccctctttttctccaggagctacgggtcatttcctgcctccatgagttccatcgtaactgtgtggacccctggttacatcagcatcggacttgccccctctgcatgttcaacatcacaggtaggaggtgggccaaggactcccctctgtgtaggcagacaggtctagaatgtggcttccctttgggaaagggttgcagccttgaagctggggagaaagcagaactgccaccatagttgtatgggctgtacactgctccagagtgcctcactcgaggggaagcgtcattcaaaatgtaaatatctttatttatttattttttaattttaatttttattttttgagacggagtttcactctcattgcccaggctggagtgcaatggcgtgatctcggttcaccgcaacctcctcctcctgggttcaagcgattctcctgcctcagcctcccgagtagctgagattacaggcatgcgccaccatgcctggctaattttgtatttttagtagagacggggtttctccatgttggtcaggctggtctcaaactgctgacctcaggtgatctgcctaccttggcctcccaaagtgctgggattacaggcgtgagccaccgtgcctggcatgtagatatctttattattattattattattattattttttgagttggagtctcgctctgtcgcccaggctggagtgcagtggcgcgatcttggctcactgcaagctccgcctcccaggttcacgccattctcctgcctcagcctccggagtagctgggactataggcgcccgccaccatgcccagctaattttttttttttttggacttttagtagagacagggtttcaccatgttagccaggatggtctcgatctcctgaccttgtgacccgcccgccttgtcctcccaagtgctgggattacaggcatgagccaccgcgcccggccgtagataatctttattattgtaaaaattatttgtatttcatggcaagtttgttgattctaaatctgggtgatttatatgtttattattccaattttctggcaataaaatattctattctaacaaaatcagtatgttaacataattttctaaaagatgaaagtgaaataaatatcttgaggaaagagaacctttttctaaggtacccacaggtgccctatgggctaacagtggccctgggtgaaagagctccaaatggctgaggggaggtttagggattgacacgcatagtggccctcccagggcaggcaacctgactggagggaacaaaggagtcccagagcacaggcagcttaggcacgtccttgatcccccaaactctgagctcacaggctactcagggtcaaatagattagctacagccatgtctttctgaatgcattctctgtaggtttgtagagttaaacatctgtgctcttggttcttttttccagagggagattcattttcccagtccctgggaccctctcgatcttaccaagaaccaggtcgaagactccacctcattcgccagcatcccggccatgcccactaccacctccctgctgcctacctgttgggcccttcccggagtgcagtggctcggcccccacgacctggtcccttcctgccatcccaggagccaggcatgggccctcggcatcaccgcttccccagagctgcacatccccgggctccaggagagcagcagcgcctggcaggagcccagcacccctatgcacaaggctggggactgagccacctccaatccacctcacagcaccctgctgcttgcccagtgcccctacgccgggccaggccccctgacagcagtggatctggagaaagctattgcacagaacgcagtgggtacctggcagatgggccagccagtgactccagctcagggccctgtcatggctcttccagtgactctgtggtcaactgcacggacatcagcctacagggggtccatggcagcagttctactttctgcagctccctaagcagtgactttgaccccctagtgtactgcagccctaaaggggatccccagcgagtggacatgcagcctagtgtgacctctcggcctcgttccttggactcggtggtgcccacaggggaaacccaggtttccagccatgtccactaccaccgccaccggcaccaccactacaaaaagcggttccagtggcatggcaggaagcctggcccagaaaccggagtcccccagtccaggcctcctattcctcggacacagccccagccagagccaccttctcctgatcagcaagtcaccagatccaactcagcagccccttcggggcggctctctaacccacagtgccccagggccctccctgagccagcccctggcccagttgacgcctccagcatctgccccagtaccagcagtctgttcaacttgcaaaaatccagcctctctgcccgacacccacagaggaaaaggcgggggggtccctccgagcccacccctggctctcggccccaggatgcaactgtgcacccagcttgccagatttttccccattacacccccagtgtggcatatccttggtccccagaggcacaccccttgatctgtggacctccaggcctggacaagaggctgctaccagaaaccccaggcccctgttactcaaattcacagccagtgtggttgtgcctgactcctcgccagcccctggaaccacatccacctggggaggggccttctgaatggagttctgacaccgcagagggcaggccatgcccttatccgcactgccaggtgctgtcggcccagcctggtgagttttcagagggaagtgggtgtggtagggagaggagactacagctgaatatttcaggacaggtgaagtcagccaacaaagggttgatggaagctgagaaggatacagcagagatgacaaccaaaatacttaaccatcgggacagcgtatcatgctggctagagtgcaggaacaccccacctctgccaggtgctacccctttagttggcagatcacagggaggtcccagggaggtgctggtgtggctgaggcatcagaaaggcacttggaaggccgggtgtgatggctcatgcctgtaatcccagaactttgggaggcctaggtgggtggatcccttgaggccaggagttcaagaccaacctggccaacatggtgaaaccctatctctactaaaaatacaaaaattagccgggtatggtggcgggcacttataatcccagctactcaggaggctgaggcaggagaatcgcgtgaacctaagaggcggaagttgcagtgagccaagatggcgccactgcactccagcctgggtaacagggtgagactccatctcaaaaaaaaaaaaaaaaaaaaaaaaagaggcatttggaatggtccccggggtagtagctcaaacataagtgtttctaaattttaataactggtttagttctaccaatgctcacagctcagtattagttctaaatacaaagaaggctaagaagtgttcctcggggggagctatagtagaaataattacacataaccataatacgaggctatataagaagagctatgtgaacaacgagaaaaaagagagagagagaaaccacaggtggttcccagcagccctgtggagccttaggttttcttctcttcccctgtggtaaaagaacaaggaggacttcccttcaacacatcattattaataagactgaccttaatttcttggggattcagtgcatccctatatcataagcagtgatcacgtaaattctcaactttaacatggtgtttacttgcccacatatctctcttttccattcaggaccttccaccttctactcttccccatcttcccccattgtatggatgacacagttctttgtctacagccatcactagaacccttccaacccaggaggtgacacaaaggtcctgaaatattcttcagtgtaggaattcttcctgcaggacctaggagctgccctcatccaattcattcatttattcatttcctttctccttccttcctttttttccttctgactatatgcctgctttgtgctaggttccaggctaggctctgaagacatggaacttgccaatcaggacatccaggtccatggggagagagccatgtactgcaagctttggctatgtgtttgtgattccattcggaccctattgtgtgtgtactttgagtgctgccagtaccacaccactatctcccttttctctcaaactcagaactagtttcagtgcctctctttttcttgcctttcacatctaatcagtgccagattctgttaactgtatcttggctagctttatcatgttcttttcaagtccagtactgatggccctgccagtgtcttaggtataccctaaagatccatgcaggagcctcctagctcttcccttccctcttacagggcctcgaaggctgagtgctgcccatccagtatgtcccataaagttgtgcaccacagctccactgctcacctaccctccctattgctgccagcgtcatctgccttacactaaactgtccagaaatcttcaaatgttctgtttgtccacagagaggaaaaatccaacctgctttggcctcaaaggttcctgcaccagccagcccccatcttccttctcaaccttattttctattctcttccctcccttccccaggcccatgctttagccaaactgggtaaacaattcttgtagttcctgtagcccagaatattctcctgccttctctattcccataaatctaattcttacctattcctacagaatcagctcatttatccccacttccaggaagcttttcctgattgctgcacttggacctggtctctctccttccttaatgcatctctcgtgactcctgtcctgtcccactggcgtaatggccatttgttttcatactttctctccaaaaaggttaccaggtccctgcttattctttttggtcttctatttggcacgtggtagcagaccaaattcacaacgaatccttaatatttattgggtgaataaatgaatagtaagtattggtaacacactggttgctatatatatttctttagatttgtttttctctcccctgtgtcccaactggggcccccttagctttcaatctaaccaccctttccagacagtctctgcttctccctccctgtggtcccctctcagccacactctgctgcaggcgagagaagcaggtccctggcctgaccctcaatgacctctttcctccccgctctctaaatacaggctcagaggaggaactcgaggagctgtgtgaacaggctgtgtgagatgttcaggcctagctccaaccaagagtgtgctccagatgtgtttgggccctacctggcacagagtcctgctcctgggaaaggaaaggaccacagcaaacaccattctttttgccgtacttcctagaagcactggaagaggactggtgatggtggagggtgagagggtgccgtttcctgctccagctccagaccttgtctgcagaaaacatctgcagtgcagcaaatccatgtccagccaggcaaccagctgctgcctgtggcgtgtgtgggctggatcccttgaaggctgagtttttgagggcagaaagctagctatgggtagccaggtgttacaaaggtgctgctccttctccaacccctacttggtttccctcaccccaagcctcatgttcataccagccagtgggttcagcagaacgcatgacaccttatcacctccctccttgggtgagctctgaacaccagctttggcccctccacagtaaggctgctacatcaggggcaaccctggctctatcattttccttttttgccaaaaggaccagtagcataggtgagccctgagcactaaaaggaggggtccctgaagctttcccactatagtgtggagttctgtccctgaggtgggtacagcagccttggttcctctgggggttgagaataagaatagtggggagggaaaaactcctccttgaagatttcctgtctcagagtcccagagaggtagaaaggaggaatttctgctggactttatctgggcagaggaaggatggaatgaaggtagaaaaggcagaattacagctgagcggggacaacaaagagttcttctctgggaaaagttttgtcttagagcaaggatggaaaatggggacaacaaaggaaaagcaaagtgtgacccttgggtttggacagcccagaggcccagctccccagtataagccatacaggccagggacccacaggagagtggattagagcacaagtctggcctcactgagtggacaagagctgatgggcctcatcagggtgacattcaccccagggcagcctgaccactcttggcccctcaggcattatcccatttggaatgtgaatgtggtggcaaagtgggcagaggaccccacctgggaacctttttccctcagttagtggggagactagcacctaggtacccacatgggtatttatatctgaaccagacagacgcttgaatcaggcactatgttaagaaatatatttatttgctaatatatttatccacaaatgtggtctggtcttgtggttttgttctgtcgtgactgtcactcagggtaacaacgtcatctctttctacatcaagagaagtaaattatttatgttatcagaggctaggctccgattcatgaaaggatagggtagagtagagggcttggcaataagaactggtttgtaagcccctaaaagtgtggcttagtgagatcagggaaggagaaagcatgactggattcttactgtgcttcagtcattattattatactgttcacttcacacattatcatacttcagtgactcagaccttgggcaaatactctgtgcctcgctttttcagtccataaaatgggcctacttaatagttgttgcaggacttacatgagataatagagtgtagaaaatatgttccaaagtggaaagttttattcagtgatagaaaacatccaaacctgtcacagagcccatctgaacacagcatgggaccgccaacaagaagaaagcccgcccggaagcagctcaatcaggaggctgggctggaatgacagcgcagcggggcctgaaactatttatatcccaaagctcctctcagataaacacaaatgactgcgttctgcctgcactcgggctattgcgaggacagagagctggtgctccattggcgtgaagtctccagggccagaaggggcctttgtcgcttcctcacaaggcacaagttccccttctgcttccccgagaaaggtttggtaggggtggtggtttagtgcctatagaacaaggcatttcgcttcctagacggtgaaatgaaagggaaaaaaaggacacctaatctcctacaaatggtctttagtaaaggaaccgtgtctaagcgctaagaactgcgcaaagtataaattatcagccggaacgagcaaacagacggagttttaaaagataaatacgcatttttttccgccgtagctcccaggccagcattcctgtgggaagcaagtggaaaccctatagcgctctcgcagttaggaaggaggggtggggctgtccctggatttcttctcggtctctgcagagacaatccagagggagacagtggattcactgcccccaatgcttctaaaacggggagacaaaacaaaaaaaaacaaacttcgggttaccatcggggaacaggaccgacgcccagggccaccagccc

SEQ ID NO: 275 - DNA, 2458 bp, Homo sapiens
ctggcggctcttgggactggcggggctgcgcgcggggttagggtgggggtacgggaaggctcaacccaggacctgcgtaccttgctttgggggcgcactaagcacctgccgggagcagggggcgcaccgggaactcgcagatttcgccagttgggcgcactggggatctgtggactgcgtccgggggatgggctagggggacatgcgcacgctttgggccttacagaatgtgatcgcgcgagggggagggcgaagcgtggcgggagggcgaggcgaaggaaggagggcgtgagaaaggcgacggcggcggcgcggaggagggttatctatacatttaaaaaccagccgcctgcgccgcgcctgcggagacctgggagagtccggccgcacgcgcgggacacgagcgtcccacgctccctggcgcgtacggcctgccaccactaggcctcctatccccgggctccagacgacctaggacgcgtgccctggggagttgcctggcggcgccgtgccagaagcccccttggggcgccacagttttccccgtcgcctccggttcctctgcctgcaccttcctgcggcgcgccgggacctggagcgggcgggtggatgcaggcgcgatggacggcggcacactgcccaggtccgcgccccctgcgccccccgtccctgtcggctgcgctgcccggcggagacccgcgtccccggaactgttgcgctgcagccggcggcggcgaccggccaccgcagagaccggaggcggcgcagcggccgtagcgcggcgcaatgagcgcgagcgcaaccgcgtgaagctggtgaacttgggcttccaggcgctgcggcagcacgtgccgcacggcggcgccagcaagaagctgagcaaggtggagacgctgcgctcagccgtggagtacatccgcgcgctgcagcgcctgctggccgagcacgacgccgtgcgcaacgcgctggcgggagggctgaggccgcaggccgtgcggccgtctgcgccccgcgggccgccagggaccaccccggtcgccgcctcgccctcccgcgcttcttcgtccccgggccgcgggggcagctcggagcccggctccccgcgttccgcctactcgtcggacgacagcggctgcgaaggcgcgctgagtcctgcggagcgcgagctactcgacttctccagctggttagggggctactgagcgccctcgacctatgaggtaacagccgggaggcagggaggagggagggccgggggccggggtggagggacggggtgggcaggcccggcgggtcgcgcccccaggagcccgcggagccgagcgccaggcccgagcgatggcttcgatttcgctcactcttcatttcccccaaagtttttcaagcccgtgcaagaccggcgtttgtttgtccgggattgcaaaacttcccctcgcggctcagccgccgacgagggaggggtagacgaggggaggggagcggccgtcgggccgttgaggtctctagtgctggcggatcctggggcagattggggtgctggaggcggggtgactttgcattgcaaatcgcgctcccgggccggggcggcagaaatgagtcggcgggcgcggagccctgactcaccgcggctccgagcgcccgccccgcccccgccgtgtctcagaccgagtcgcggcacccacggactcaagactccaaaaccaaccgagcaaacgaaactgccgacttcgcttgggggaggtgcgggcagggccggcccgggcggggtctgccccgggcccgcgcccgcgttgacgcgcgtttggttccccaccttccccccgcagcctcagccccggaagccgagcgagcggccggcgcgctcatcgccggggagcccgccaggtggaccggcccgcgctccgcccccagcgagccggggacccacccaccaccccccgcaccgccgacgccgcctcgttcgtccggcccagcctgaccaatgccgcggtggaaacgggcttggagctggccccataagggctggcggcttcctccgacgccgcccctccccacagcttctcgactgcagtggggcggggggcaccaacacttggagatttttccggaggggagaggattttctaagggcacagagaatccattttctacacattaacttgagctgctggagggacactgctggcaaacggagacctatttttgtacaaagaacccttgacctggggcgtaataaagatgacctggacccctgcccccactatctggagttttccatgctggccaagatctggacacgagcagtccctgaggggcggggtccctggcgtgaggcccccgtgacagcccaccctggggtgggtttgtgggcactgctgctctgctagggagaagcctgtgtggggcacacctcttcaagggagcgtgaactttataaataaatcagttctgtttacca

SEQ ID NO: 276 - DNA, 391989 bp, Homo sapiens
agcgttggggtaaggtggatctggctaaacctaacaggattctcactgaagacaggccagggtgatcagacatcacctgggggatggtgcaggatgagaaacctggtcagacattgaggcgatcggatgttgatgttgctggttcttggtaaaacgacttagctagtgtcctttgctaaaactggattttacaaggacgtgcacaaacaggcctagcaggagattcagaagcctgactaaaatttggccaaggaaaaaaatccttgtcaccaggaaagtgaggactattgtcaccaaattcaggtaaggaaaacttgaatcaaaagagtgtctcatgcaaggacatgaaagtagagaaggccaggactagggagaagcgagggaggtacagatgcagggtcagatctcatcttgatctaaaatgttgaccatttttattatcattaatttttctctgcattatacagttttttaactattacattaacatattactagtcttgaattttttttgacactttcttaagttttacacctgaggtagtgcctctcttgtctcaccctaatcctgaccttgctaagtagggaattatgacaagcacaccagggccgttacatgactctgcactcctgctatttaagcatgatctatgttcttagctgtaaattctaaatcaaatacatgaaatgaaagggtactccacacattcacatttctggatgcaaaaagagatacacaattatgcaaatataatgcctgcttttgttcagtgctttaaaatgccaagccattagaacatcttaaaaatacaaaacgtgtaaaaatcttttaacgacatgcttattacaacccaatttggcataacatgaaaatattggttatagcaaattttaaaagcttttcaggcacatttccccagtaagataaaggtttataattataatgtgattgaatatataacccttgtcatgtctctcagggttaacttactagaattccccacacttaatgtaaataaggccaaccaaatccaggatggagctaaaaaatgcttttgcctattactgactataataaagaacaaaatgaatttaggaactgaaattaggttcccaagaagccccagggtaatgacctctatggcactgtgaaaacatttttttaaattacttgaacttgtttacactgatgcttttatagcacagctactttcaagggatgcctgaaatcaacaatcttactctctaactggttcagaaaaaaaaaaaaaaaaaaaaaaaaaaaaaaaatatatatatatatatatatatatatatgcaatattaaaaaaaaataatggaagaagctcttccagtaagaggtttttgttttttttttttcccctggggacagaaacaagaaaccaatcatgccatctaatttctcaatcttcctgctgccaatccctagctccctttaatggaagccattaatatttaaataaccagggtagttacagcacttcccttgtaagcagatgttgactcaaagatgttaaaaaaggaaaacaggtaaaactggtcctgttttaattgatataaatctaatacataaaagtaagaattgggtcaatttagtagatctcattaacatttaatcaaataactatctgagtcatggtttcccattcaggtgaattaaagcaccgacatacttcattttacagttctcattcaacagtcagaattcctgaactgtgcttagctgttatctctccttatgagaatgaaagctattatcataaatggagaagtgggttttttaaacaccctctcatatgtttttgcttatcctaaattagcatgagtccttttatttattgaacatttattgagcaatttctaaaccaacaaaccttatactagacagaggatatctcccacagaaagttgaaaaagaaaattgttaaccctacactttatcatacctacttgaaataatatgaaaacagtggtgctatttccagttcaaacatatcatattgaagaattcaaacaaaatgttcttcttaataaatgtttagaaacagaataaaatctgggtaaatacaaaacaatatcaacagaatcaaagactctaaaggtcaaaagtatataatttgctaaaattgtcttactaaaccttaaatattaaagttgaaaatcatgtgtccaatgtatgatttttgatatggaacaaagctatttatccacagtgttctttagaataataaaaattgtcaataaataaaatttccaacagtaagacatcagataagttactatataccaaaaagataaaattattatacatacagcaattaaaatgattctactaagaatgttttgaaaaatatgataaaatattattaggtaaagaaaagcaggatattagattggatatatggtttttttccttatttaatacttcttaataatttctaaattttctacaaaaattttatactcagaaaaaaggtaattttgttgcttttttaaaaaaacaaagtgaagcaactgctagacatggcagaaaaagtgcttattccttattactacctgggtatgacctcttctgtttcctaggaataaggttctatttgtacttctagaatagcttcttctttctctaacattctgttaagatatgtcctgatctcctaaagccacagaatcccagagactcaaagtaaattttctcttcggcaaatcagaaggctctgcataaatgtgagatgctattataataatatttattatcatatctgaatttcattctgcctggagtacagttcataatgagagtgcatatagttggtactaagcaaatattattgaattgatgaatctaaataaggaaccatattttagacctacaagatattaaatgttcatgtggtccagttccttcatcttcagattagaaaacttttaccaaggagtaactgacttgatcaagatgacaaggccaagactcaaagccagaatttacttatggctctaaatctcatctgctttccactctcccgtcttttttttttttttttttttttgagacagagtctcgctctgtcacccagactggagtgcagtggtgcgatctcagctcactacaacctccgcctcctcggttcaagcgattctcttgcctcagccccccatgtagctgggattacaggcacccaccactacacctagctaatttttgtatttttagtagaggcggggtttcaccacgttggccaggctgacctcaggttcctgatctcaggtgatccacccgcctcggcctcccaaagtgctgggattacaggcgtgagccaccgcccccggcctactctcccacctttattccagatatattcaaatattctgactcttactgtctcaatagataataacagcctgtaatagtcttaaatcccttttatggattgttaaaggatggagtaaataaataaacaaatgaataaaaagaaacgttgataagtaaatctgtctagagtagtctggtttttagaaacaactctgtaataacccaggtcctgccatgactcatccgaggaccttggtaagacagtaacttctctgggtcccacctgatgtgctcaagccagcgcaagagagctgatggttaaattttcagaaatattgagagtcagttgttcaacagagccaccgttaacaattaaactgttattgaagaagttacattttaaaacatatgttcaaagtactcaaaacttatcatttcctaatgattttactacattttactattatctgtgatctagagttatgttttttgtatctgtgtggtagacagattacacatatgatgatttgcttctgggcatctttttccaactatgtgttcagtaatcttgttggtagcttgaaatcaactatggtaggagtatttataccacagtaaccagcaaacaccagaaatcaggccttctttttttcagactgccaattgttaaacatttacctgcacatactgggctcatcttcattattggtaaaatgagctagatgctattttccattagctcacactccaattccaatcgacctgaccatcagaagagacaaaaagggaaaatcctggccagttctcccctacctgatcaaccagtagcataatcagatttgcaagacctcaagaaaagaaacctgaaaatgccactggaggtgtgtgttttgccaaagaaaaaagaatcaaaaacaaaacctgcaggatgaggacaaacaaacaaagagcaggtatttaaaccagccttatattctccccttcactcgtttccacttccccactttacactatcgattactccaatcaaaggatacatatctttcatataataaccattgtagctgcaattaaaatagttattgcccggcacattggctcatgcctgtaatcctggcactttgggaggccaaggcgggaggatcccttgagcccaggagtttatttatttatttatttaagggacagagtctcactatgttgacaccctggacaacactcttgaagtactcttttcccagggaggacacagtcatggcatgcaaggtaaagggcaaccttttgctgaagtggcactgagacacgcctatctccttttcacaggttcctctctggcatcagacagtgatgtctaatctctctaacgaattagtcatccctgtctctgccaccatatccttggatgtgcaggaaaaggaaactagaggtgtgtggcagggagagaatgagaaaaatcaggaagaggagaaaataatataatctgacaccacagtctagagcttttccttgaaatcccactccaaccagaagggaaatttaagtgggcatgtggtggaaagtaaaatgtaaacattatcccaacatgttcttcaacagttttgaaatagaagggccatgcctgtgactaaaggcaccatcatgataatgataccagttaatagctaccaattactgaatgcttactatgtacaaaaaactgtactgattgctttatattttttatttctaaccaggaaggtaagggttacaaacaaccttaccttgtcatctcattttatagacgagataccgatcctcagagaatctaagtgatttgctcaggttcacagttagtaagtggtaaagcaaggaactgaggtgtcggggctcacaacatgataacccaaaataatggcaccttggcacagtgagtattttaaacagcaggaaattgaaaaaacagcagaagcaggaaggctgctctctgaccttttcccacctttttctcctgagagctggccatgaaagaattctctgacctacttcccctgaaagtaggtcataagaccctcattccagaggggtcctgccctatacccagagggaaggaatgtcacaccgaggctgaaaggaatctgaacaaataggcctcgctgagttccccagattattactattagatcacactcttttgtcctccaattacacttctgcacaactgtccctaaacacacatggttttccctgggtccttggggcttcgttttctgaaggtttctgtgtcactgaaaacttacattaaatataacttttatacttttcccatttaatcttttttttttttctttttatttgttataggggctcagccatgaaccttgtgatggatgaggaaaagatattctttttctccccttacagtttctggcagccaacatggggtggctgtgacaccccactagttccagaacctgcagatgagatcctgggacaaccaataaaaaaacaacaaaaagttaagagtttttttttttttttttttttttttttttaaaccaagatcagctctcttggatctctgctcctaggtagggatttcctttccaaattcagattagcagaagaaaatcatttgtttggattgtgactcatgtaaatctgatttggggatacccattagttattgatcctttccctcccagggacagctatctcattcctgtttctctccttttgtttcctgagtgcttcgcttcatgagtggtgacaaaactctctctgggcccggcatgatggcttatgcctgtaatcccagcactttgggaggccaaggcaggcagatcacttgaggtcaagagtttaagatcagcctggccaacacggtgaaaccctgtctctattaaaaatacaaaaattagccaggcatggtggcacacgcctgtaatcccagctactcatgaggttgaggcaggggaatcgcttgaacccaggaggtggaggttgcatgagctgagattgcaccactgcactccagcctgggcaacagagtaagactctgtctcaaaaaaaaaaaaaaaattaaaaaaaagaaaaaaactttctctgctctctgccagatggggtgcaagtgtttcagctaacaatgagtgggaaacacatctctgggtagatgatctgagactgagagggagccagccttgaggaaacagtacaaaagccctgcagtgcaaacaaggtgcttactgtgggttggcgggcacagtcaataggggagggagtggtacacaatgaggctggagagacagataaagcagagctcctagagtcttatcttccttcatctgtgttagcattttattctaatgataatgggagaccactggagagtttagagcaagggaggaatatcatctgatttacactgtgacatgattgctctggttgctatctaacaagtaggcttaaggagaatcaggatggaaccatgatacctcataagaggccactgttataacccaagagatatgacaaaggctggggtcaaggagtagcaggggaggtaatgagaaatggtcagctacattgtgaaggcagatccatgaatatttgctcatagaccagacataatggctaagggaaagaaaagaagtacaaggatggcacctgttttctgcccagagtaactgcatgaattgttatgtgctgagctgaagatattttgaagttctatctcctagtacctcagaatatgaccttatttgaaaatagggtctttgcagacgtagtaaggttgatgcaaaagtaattgtggtttttgccattactttttttttttttgagacgagtctcgctcggtcgccagggtggagtgcagtggcacgatcgcagctcatgcaacctctgcctcccagattcaagcaattcccctgcctcagcctcccaagtagctggggctacaggtgtgtgctaccactcctggctaattttttgcattttagtagaggtggggtttcaccatgttggccaggatggtctcgatctcctgaccttgtgaactgcccacctcggcttcccaaagtgctgggattacaggtgtgagccacactacttttaattaaaagtaactttacaccaacctaataattagctacaatgagattatgctggagttggattagggcagggctttcatccaatataactcgtgtccttataataagaggagggaactttagaggagaatgccatgtgacgaagaggcagacactaagtgatgtatctacaagccaagaagcccaggattgctggtaaacatcaacagctagaagaggcagggaagatcgtagcctacaggtttcaggaggagcatggtcctgctgacacattaattttggactctaccattcagaactgtgagacaataaatttctgttaagttacccagatggtggtgttttgttacagcatccctaggaaactaatacatgaatagtggggccatgattggagatcaggaagactatggaaggagttgggatggagggtgtgaaggcacaaaaccccaagagttctactttaagttgcctggtaggcgtccagtgaaaattctgactggccaacactaagctggaaaagggaagcaaaactgatttcttacatcaaatatgtctggcattatgcaagccaggatttcccacagggtcctttatggaataccaattctgtattatattaacagattttataatatagacagattttatctgtctatattaacagattttataaggaaaaacatttgggaaagtctgggttaaatacaattaaatgggctcccttgttacagaacatctcatagccgttcactaacagacagcacaccttttcttgactgtgacactattcttagacaagccctaaggccagagctttatatgagacatatccatatgagtaaactcagtcccaggttaaataattttctcatgccccctcagctattgagttgcaaagctggaatctgaagccatatctaggtgatgtcaaagtccacgtattttccatataccactatataaacgacagaatataacgaaatctgcctcaatgcaactgttgataaaaacggaattctgaataaactggattgttttgtccatttgcagaatttataggtactgaaattgcaaatgactgaaaggcatatttatctgtaaagaagtgaaaatcacaggtccacagattgcttcataatggatttctagtgtacttctttcagtttcagaaattactttttggggtaagtgaagctctctactctttaggacattaaaatctcatggcaaagtcagtgtcttccactaagaaatttttgttagttttgctcaagtcagtgtagctctgttcttctttagaattgcctccttttgaatggtgtgaacccaggaggcggagcttgcagtgagccgagatcgcatcactgcactccagcctgggcaacagagtgagactccgtctcaaaaaataaaaataaacaaaaataaaaaaaaaaagaattgcctcctttctattgcctactataattagcattttcaaataagaacattaggatacaccgggtggcaaatacaggctaagattgggaacaatgaatgagaacattttatatgaggataatcctagtaaatgtggcaatgtcatcagtttaaccaccactccctgaagtgacaagaaacttctccctgattctaaaagagtgactactatttgtagcagtaaccactctataggactcgcttccatgattctagtacatttctcagctcttttccatatgttgtctcattcaagcttcacctccactctttgtgtttttttgttttgttttgtttttttgagacacggtctcactctgtcacccacaatcttggctcacagcaacttccgcctcctgaggcataaatgatcctcccacctcatcctccagagtagctgggaccaccggtgcatgccaccacacccagctaatttttgtactttttgtagaaatggaattttgccatgttggccaggctggtctcgagctcctgggctcaagcgattcacctgccttggcctcccaaagtgctggaattacaggcatgagccactgcgccttggcccacctccactcttgaaaggagttagtgtagcacttcaatagaggcccatgctgactgggccactttgcaagtgataatactccaggcagcagctgacctggaacagactccaagttgactggaccatccactcattcactgaataaatatatccttagctcatacaatgaataaaacagacagcatctgccttcatgaactgaggaagagagataggcgagagcttttaagaaaatcaaagcaggataaacggaatagagaggaaaggggtcaagcagtggcactatttgagataggtggtcagggaaggcccccctgagtaggtgacatctgagcagatctgagggcatgagacagtgtctaggaagaagagagttcctggcaggagaacagtgactacaaaggccattaacaggaaacaatgcagatggaagcccatggtgggggccaggtgagcgatggtcggagtggttcgaagggggatcaggtacaggctcgtgctgggtattgaaagctaacctgtattttagggcactgcttcttcccagctctggatatctctatcagtgtccaggaagtccaacagtgtaacactgctggccccttgctgctgccttcttccctccgtaggggtagggtgtcaggcagaaaggttcaccttatgggtacatttggataaactggtcatgttgggctcacctcactccccatccccacatgaaacggtgcttttctctctaaaccctgtgtgaatctgaggattgctgggcaagtctgctcagtcaggcatcagtcataggaaacccatttgcccaaaaggaaaagtgccattccagcccagcctccctcgttaatcaagctgatgtttcactgtcctcctgccttgctcttctttcttatttctcaattttttcagaactcatgaaagaaagacaaagtgctgtgttttgagctccctcagaggcctcaaaaatggaatttaggtcttattctagtgtaacccctatactccactgtctctattatcctgcaaaatttcatcatatatacaattgaagaaagacatggttaatagtatcagcttcatcagtcatacccagaatttaaagccccatacagtctggcttgctcacaccaaccctgaaaagagaaagtggaggatgagaaatgacatctcagatcaaaccagccaaaatgtcttcacacagctaatgcaagggcaacaaagtcactgcatgcattccctcattaggtatttgaaaatccactacgtatagtatccaaggtgcagacaacagaaaaagcccacaggctggttcatctgcttcataagccactgaataccctctattattgcttctgtcagcagtttctgaaggcaaaaaaaaaaaaaacaaaaaacgctgttttctttcttaatgtattctgacttctgtgcatatcatcttgccaaaatcattaataatctccatatttctaaattcaaaagaaaaatctgtctttatctttattgacttttctgacatgctgacagtgcccctttggcaaatttatcgatgccttgccttctgtaatttgtgttttcatagatcttctaaaattcttctagaagtctatccttggcccacagcttatcacacttccacacactaaagagtggtctcatcactttaaccagcactttctgtggacaccactcaaaatgagagtgcctctcaaaagcttctgcctcatccatccaactgcctgcctaacatttttacctgatgccccatgggtatatgaaactcaacatgtcaaaatggcatttaatcctgctgaaacgtggtgaatcagaaacatttgtttatttctgtcccctcatgaaacctctctaaaatgagagtaaagacattttttaaagttataaatcccaatacccaagaaaatagaagagataacagtaaatggggcagatcaaatttttgttgttagatggaaagtgaacagatagtttgcagagaatgaaggcagaatataaataagaaacaagctaattcaaaccatacaactacagaaagggtcaaaaatggtaagtactggttactgcagaaggcaaaagtaaagtatggggctgaaaatggaggaattggcaagagtctataacagcatttagatcctcaagtccctccccagtctaaaagagaggtgaaagccttattctgcagcaaattcattatttggacattttcagtagagacactctagacttgggaatataagaaacagtgaaagttggggaagagataccctactgaaaactcagaaattctacacactgacagaccccagccccttgaacactcagcagaaagaatgtaggcagtaaggactctataccttcattcttcagcctctgcaggagactgaagaattcttctttgcaacaactgcattctcttagagaaagaacctacacataatgacatgtaggatcctctaatgaagcatgttgaatccaccaatcaactgcagggagccagtgaactgctgacaaatcccttcaacacagtgtccaaccagcaatttagtttctcacacttaatatgtaaatagacttcaaggaaccattgggtatttgagcaaagcctccaacttggtagaaaatccaaaagaaactgcacaaaaataaaaactcacaagaaatagcaatgtatgaagcagaataactctccaaaaaccaaaatgtctttaaggagataagagaagatattgcatccattaaacaacagaataaaatacaagaacatgcttctgaaaattaaaaacataatcttaagaaatcttaagaatttgataaaaggacagtgcaattaagttatagaaatctcacagaaaatataattgaaagataatagaactttaaaaaataggaagaaaaaagataaggaaattagaagattggttccagaagaccaatatctgactaatgggagttccagaaaaagatggcagataaaattcaggggagatcaggtggctcatacctgtaatcccagaaccttgggagaccaaggcagaaggatagctccagcccaggagttcgagaccagcctgggcaacataatgaaatttcatttctacaaaaaaggtttaaaaaattagccagacatggtggcacacacctgtgatcccagctacttagggagctgaagtgggaggatcacttgggccccaggaggtcaaggctccagtgagccatgatcgcaccactgcactccagcctagatgacagagagagaccttgcctcaaaaaaaaaaaaaaaaaaatcagggtaagaaattatcaaagaaatactgcgaaaatatctgcagaggtatagatatgatttttcagatttaaaggaaccatcaagttcccagatcaagaaatgaaaagatgaagaacacatttcagaagtgactattagaaactttccagagaagaagacagaaagagaatggtatcacataaaaagaatcaaaagccaaaattgtattagattttttttttttttgagacggagtcttgctctgtcgcccaggctggagtgcagtggcgcgatcttggctcactgcaacctccacctcccaggttaaagctattctcctgcctcagcctcctgagtagctgggattacaggtgcacgccaccatgcctaactaatttttttgtatttttagtagagacggggtttcaccatgttgatcaggctggtctcgaactcctgacctcgtgatccacccacctcagcctcccaaagtgcttggattagaggtgtaagccaccacgcccagcctatatcaatcatgagaataaataaatattcagaaatacataagagttatttatttatttttatttatttattatttttacagatagggtctcactctgtcacccaggctgcagtggcagtacaatgctgcaattacagctcacttcagcttctagcttgcaggctcaagcaatcatcccaccttagcctcccagagtgctgctattacagatgtgagctaccacacccagctagattttgatttttatttttaatttaatttttttcacctcatatacagcttgggaaccagccagttttttttgtttgtttgtttctcatataccacttctcagaaagctactggcaaatgtggtccaccaaagcaaggatgtaaaccaagaaagaggaagacatgggagcccactaacaggggaactaggactgaagaggggaagtgaaatcacagaataacagttatatttaaagagcaaccactgcatattggagcagtaagatagagggggatccacatgagatgtcctcaaggaagaaatatatctataactgactaccgcatgagtttttgtaaaaaatcatatcaataaggatattacagttctgtcagcaagtttggacagaagttataagagtgatagagaaaatagaacaatccaaagaggaaatttttaagttgatgaagaaaataaaactgtacaagacatggattgcaattatagtatactacttggctcagcagtgagcatatttacataataaggtaaatattagatattgatttggcaaaagagaaaattatatcaccatttggacaggttggagggtaggaaagtcaggaggtaaggtatgtaaaagtggtgaattttcaccttgttgaataagtcaatagaaaatacctcaaataaaaggtgtaaccctaaaaccaataaatcaagaaacagattaggcagattacttggaaatttggaattaaaggctagaacagacaggtaaaagtatgagaggaggtctcagagataagagaaggatggggaggtggggagaagaagactaaaattttttatcatgagaattataacattacttttattatattgacaaaaatcaaaagtagttaagaagaactcaaaaactaaacttattatctccttccctaaacttgtccttacttccctatttttcatcttggttggaaatactcccatcaactcaagtactaaagccagaaatccaggatgtattctttatttatccatttttctctggccctgcattcccacagccaatcaatcaccaactgaatctcctagatgttcttcaaattcaccttcacctctctaaatctactctcatggcctaatccagttctttattgtgacttgcctggactactgcaaacctccaaactagtttccaaccttgactttaactcctaattaaatgaatccctctatacttccctcatgtgctgctgtctctcctattgaggtggcatcactgtctggggtaaatacctggggttcgccatctcatgccaagattaaggacatggacacgcacaaggagtgagtttaggagcagaggtttagtaggcaaaagaaagagaaaggagaacacttctctctcttgcaagagaggggcatctgaatgggaaatctggccctccgtggagtgcaccagattttatagacaggcttgaggaggtggtgtctgatttatatagacaaagattggcccacagattggctggaccaggtgtgacatttacatagcatgcagggaagctggccacctcaccctaaccttattaagcaaatgggctttccacttggccagcattactgtctgttccctactgtacacatggttggaaaggaaaagggaagacggagctgccattttgaacatgcctagcccaggtagccttttcctattggcacaactgccggcattcacctgtgcaagcttccagcttacttgtctatgtgtgtagctcaattttataggcaggctgctctttgttagaaaagaaaatgatttggggtctgcttttcattaaaaggaaaaccttaccgaggactcctgtactctcactatctgcccaaataatttcttcttaacgcctatatcactattttgggaggtcatagaatttatagcatttaaaaatttgttatgcagcaatagataaccaatacagaggcaggagaaaagcataagtaggaagtggagaaataggatggaatctagagaagtcagtagagagctgatcagggagagttttctagatatgctaagaatctttatcctctagtgactaggaactactgaagggcttgataatttgaaaagagtactatgaacatcaatgtaaggatggacttaagccagaaagacagcaggcaggaaggccagttaatatgtttcacaataatctagaataaagatgacaggagtttgaactagggctggaaactagtaataatagcgtggagagggcagacttaaaaataattagaaggttgactgggagcagtggctcacgcctgtaatcccagcactttgggaggccaaggtgggtaagatcaccagaggtcaggagttccagaccagcctggccaacatgacaaaaccctgtctctacaaaaaaatacaaaaattagccaggcttggtggtatgtgcctgtaatcccagctattcaggaggctgaggtgggaggatcacttgaacaccggaggcagaggttgcagtgatccaagaccacgctgctgcactccagcctgggcaaaagagcgagactacgtctccaaataataataataagaagaagaagaagaaagtaaaactggaagaaacttgtgattatatattagagttgaaatagaacaaagaatctaggatgatcccagatgtgacttagatggctgggtgggtggacagtggtgccattaaccgagaaagagagagacccagatccctgggagtgaaaatcagctctgctgctaatcagtctaagatgctcccaacagaacattaacaatgtttctatatacccaaggccactctgcagctgcagtatgatggacagtccttttttctgagcaactgctgtattcttaccaatgatagcgctttgtccctcccatctcctgaacagagactgctgagagtctaagttcctgagctgccacgggcacttggcagcagctaatccagcgggtacctcttccctgatccctccttcgactcattcagcacaaggccaaatatttcagaggcctcttcccacttctcccaacctttgggtatgtgtcctcctttgctggacataatgctaacacacctaactttgtgtcattacacatgtatttctcatattctctgctgagtgggtttcaacttccatcccacttgaaaggtgtgctgagaaaaggtagaaggagactaaaaaatagggagaaaagagacaataaagccagaccgtagaggatggctgcgggctccctatagtacattacattctaagacgagcaggaaaggctctgccacaattcctgaatgtacaaggtcaaaagttccagccttcactttgccaacaggtatatccttgggcaagccaattcacttctccccttggacttcagttccttcatttgtaaattctggagattagatggactatataattcccaaaatccctttcagcttggaatgtctaagattctaaaaatgcagccaaggagatcaggctaaaactgcttcaggctttgagtcacagggatgattcacgcaggctaccttaatgaaagaacttccacatctgctctaggtgccctgaacctacacatttctgtcagtgttcgtaagacaacctaagaaacctaagaaaggctattcttgggggggcaggggggctacaacactgattaaattacatgttttttaagcacagattttttaaaaatcctattaaaattctaaatcagtggcttccagcaatttttctctgaaacagacgtctcggattttgcagacaccaatgttcaggcacacgtgtacacaagaatggtggaaagagtcatggttttacatggagtgtgcagtctgccagctcagaaatctcctgtgtcccaacggcacaggcggttcattctcctgccagccaagttaattctaccaacatgccaatagttagaaggggagaaaacaaaacaaaacaaattatttccacttgacttgctgattgctaataatattcttcatcaagtaacccaggcaggaacacttttcatcttcagaattagctatggctgccatttccccttttgtcaaatacagggagatatttcccacggtctgcacatgactcagaatggcttcatctttatttcacgttctacatttcttgttgcttgacttaggagcatatgagcttttccctagccaggcctttccctgcaacctacctaccctccctcagcactaaacaatcacatttcttgatccattcaaacatgcaggcctcggctggacacagtggctcacacttgtaatcccggcactttaggaggccgaggcaggaggattatttgagcctaggagttcaagaccagcctacgcaatgtggcaagaccctgtctcacatcaaacaaacaaacaaacaggcttctacccacactcttctatacaaatagttttctctcctttaacagaactcaactcttcagagattttctaaccatacagtaaagggtgagacactttgctaaaacttgtggagtagttaaagatgaaaaggggacagtatccaccttcaaggagccctcattctagcaaagagagacatgcatgaaaaccagtaaaccctaaatactgtcataaagcatgaggaatgcagttctgtgccccactacaaataaacactgcacttagtaaagtcctcactggaggaagaccccattcacaatgcaaatcctattactcactatacaacttgctacttctaactttgggaaaaaagcattgaggaagcagcataattctcagggcttccatagtcaactgggggtaatcttgctccaggctacacattctatcgcaccctctctccaaagactccccagggaaggaaaataagaaaaaagcaaaaagtgaccttagacaggcacaactgtgggacaatgagggaaggcagaagattgatggggtaaaacaaatgcataagtgaaaatagagcttttctccacttcacccttaaataagccaggattttaggtatgatcttaaggagaatgaatgaagtgattgttgaactcagggaagtaggaaggttgcatgacctttgtaccagctttaggggctggcatttctgagagaggctggcccttcctgtagagttcaagaagttgggtgaaaacaaggcacaatcagagggcagacatcctgccaattgtgcaacaaccaattgtgcaatgtgctttgagcttccctgctgatcaccttctcaaaacagaggggccacagtaaggagcctacatgtgcaaacgcctaacacagtacctagcatacagtcagtagcatataggaaggcaatgcagtccggtgggaatagcatgaaagatttaaagtatgccctcagaccgggcacggtggctgatgcctgtaatcccaacaatttgggaggctgaggtgggcggatcatgaggtcaggagttggagaccagcctggccaacatagtgaaaccccgtctctactaaaaatacaaaacttagctgggcatggtagcacatgcctgtagtcccagctacttgggaaggtgaggcaagagaatcgcttttacccaggaggcggaggttgcagtgagccaagatcgccccactgcactccagcctgggcgacagggtgaaactccatttcaaaaaataaaaataaaaaataaaaaaacaaagtatgccttcacagcttcaaatgtggcttctgccacttaaaaactctgtaccttggccgggcgttgtggctcacgcctgtaatcccagcactttgggaagctaaggcaggcggatcatgaggtcaggagatggagaccatcctggccaacgtggtaaaaccctgtctctactaaacatataaaaattagccaggcgtgggggtacacgcctgtagtcccagctactcaggaggctgaggcaggagaatcacttgaacccaggaggcagaggttgcagtgagctgagattgtgccaccgcactccagcctaggcaacagagtgagacaccatctcaaaaaaaaaaaaagtagctgttgccttgtgaaaagatagacaagttcattaaattacctggcttctgatctgcaagtgggttacctggaaaaagcgttgtatgctctaaaagtcctagataaaaaaatttatttaactttctcttcttctttcctctgcctcaccttaccccctgaacttcccagaatgggaaaaggaaagacttacttcactttactagtgcagatatggtcttttagttaggaactgtggtcaattattaatgagaactgcagctatagtaacactgtagataaacaggcattaaaatactaacagatcattgaacacctgtatttattttttgctccaaggactccatatattcagattttcttcaagatcttatccttttttctctttccgtacattcccattcaaccaccccttgagtattaatcactagtccaaatgtttgttcagtcctgacattgctattgggcatttcaggacagtatcaccactgtcagctgtcacctccaaaaggataaccaatcagcccctcaaacccactgactctataacaggacgtcatcattctcctcaaacttcctccttctatgacttccagatacttttttttttttttttgagacacagtcttgctctgttgcccaggctggagtgtagtggtgcaatctcggttcactggagcctctgctgccgggttgcagcgattctcccgcctcagcctcctgagtagttgggattacaggcatgcaccaccacgcctggttaatttttgtatttttagtagacacagggtttcaccatgttggccaggctggtctcaaactcctgacctcaggtgatctgcccgcctcagcctcccaaagtgctgggattacaagcatgagccaccatgcccagcgacttccagattcttaatgatgctcccttataattgcagatgcctgagttctaaaaccagaagtcctcaagtcaaatctgtcaccaagtgctattctacttccttttttctccattctatccacagttcaacccttacttgccccgagacatttacaaagcttcctaacacatctctcagacttccggtccttttccctccaatttagcctaacactgatgcttcagtgagctttctaaaacacaaggcactccattcctcccatgccttcaatggctcccacctgcaaccaggaaaaagtataaactttctacgatgaaatttaatgtcctccatgatacaacttcaacataacttttcaaaccaaagttacatgattccttcacaaactcttagcctatgctccgccaaatcaaaactctccttgttccctaaccctaccctgccttttatgtttttacagctttgctgagcaaacctccaggcaaacagtaggaactaatcaatgccagttgattaatcaattgaaatcaataccctggcttctaatcaataatagaatctaggtagattctagattgcaaaattcttttgacttttctgaaagtttaaaccttttcataatcaaacactgggaaaaaattagttaaatgaataaataaatgagaaaatgaatcgcttgggacctgggttacattctctcccaagaatcatacagtacaaaaagatatgtggcactatctttttgaaagaggggtaatgggatacagagtcccaaaaaggaaaggaggaagagcttacctttagggttcaaagtaaatattttggcctgtaaacaattctaagcaatttaaagacaaccaataactagaatcagactagagagaaaaaggtaggaggtaagttccaactatattggaaagataagctgctaagaatttgctttttcaggctccaagatctaaggacacagtccttccccctctttcactaccaccaccctgtcctgcaccccagggtctgagttaaagcaatgaaagcatgtgatttcatgttcaaggttatacctctaatatctcttaagggagagcaatctcaataccctggtttcagttcagatacgctgtaacagctgtcttgtgaactgtctattaaggcttacatctttgagcttgcaaatatagtataaaagttcaaactccactactgtttttaccaggaaagtacagttcttagctttttgcccagcttacctctctcacaagtcaatatagacgttaatgagtcattgttctagaggtatctttctaattctgagaagcttgcctacttcttttaaatgttcttagttcagtcaatgaaaatctcacattataaagccatcggaaatggtaaactaaaacaatcatgtttgctctttagtgaaccatacttcctattaagaaggggtcactggccaggcacagtggctcatgcctgtaatcccagcactttggaaggccgaggtgggaggatcacttgaggtcaggagttcgagaccagcctgggcaacatggcaaaaccccatctctaccaaagatacaaaaattagccgggcatggtggtgtacacctgtaattccagctactcaggaggctgaggcacaagaatcccttgaacccgggagatggaggttgcagtgagcagagatggtgccactccagcttgggtgacaaagtgagactcttgtctcaaaaaaagaaagaatgggtcattactatttaccttgagtatttgggtgctaataaacagatatctgatgatacctggggcaagaactgagttcctcccctctcattgccttagttctgtgcatcccagggtagtattcaacactcagtgtttcctctgacaaactagatgcttcccaaaacaaaaacaaactcatttttagaattctgttatattatttgcttcttgtttttattttttgtggggagtgaactggtaaacccagtggactttcttaacactcttctaagtcattcaaactgtcagtcaaaacccacctatttctcaggctagtagaatcccactataaagtgatttataaactggatttatataaattgggggatcaattgcccctcccaaacaatcatctcctataaaagattaataaaacaacatctggttaagaacactgacactacattataaagggttgcccctgtacttagactagcatgaggtacacatctagaatgcccagttagccaaacggtcttgacgaccatgcagactttcatatgccaacaaagccggtgcagtgtacttttccaaaagtgctccaattctccttttggacaactttcttaaacgttatttaccaagctaataaaatgtattctcaatggactttttactctgcttacatctttgttcttactcatcccaaagcaaagaatggaaaaaaaatgagttgtacatttagccggggaagggaaaggcaagtactgaggggctcctttttcatttactgatgccaaaactgaggctgtggaagataagttacgtccctgatgtcatccaagtagtggataccggaaccaggaattgcacagaattgtccagctccaaaacccaagcaccttgcttgggacccactggggttgcagtgaaggtggggggctcagaggtgactgcacacgggtcatgcatagccacagtcattatatggccagagttttaaacattattttgttctgtcttcaccatagacttcatcatcaatcataactgataaggaaaattacacttagctgaaaagccaagtcccgtgctagggaggcattttctgtatgttatttctatttccaataaaacaattctttaaaaagaaaaacttattatctccatctttcagatggaaagactgaggtttagtaggcttaaataatttgcccgaggtcactcactagccaaggccagaactgggatttaaatccacaaatattccaaagtccttttgtttctgtatcacttcacagggagctgcttccacctgtctcctgtgcccttggtttctgctaatcctacattccaagaataaaagtcttcctatgcgttcctaggcagaagccaagtttccctgctttgggcacgttcaaaatagaaggtattttccgcttctcttgcttctgagcacccacgaaatcaacacatccccaaaacacgcgttgagggagtaagggaaagtgtcctgcacccgccaccctcccgcgctaagagcggcagaggaccccacagcttcgtacttccccggaggagctcctggagtaggagacggcttctagcctggaagaaccccgggtgcgacagttgtgccaggaaacttcaagagtattccctcggctgggcgcacgcagtacatccccaatgctccaatttgaactttgactcggccacgaccaccccactccagtctcactctacggtgctttctcccctgttggtgctgagggcttttgagactacctgccccgcgctccctaagtccgagggaccgaggcgaggacctgtcccgctgagctggcacgacccacgcagggcaggcggcacttacgcggcgcagtcggtgctcctccctgagccgcggcgcgcaaggaccccagccggttgtccttgcagcgcttcccaaatcaggcagaagtgaggcagccccacccagtcacgaggaccctgcagaactcgagcctttaagcgctcctctaggctcacatgacccagacccacagggcaaaaagtgcgtcgtcgtgtcccaacctcctggtcccagaaacctggccgcatcaagtcagcgcttcccatgctggaagaagcaagcagccccagggtggaatcttaaaaattaatgaagagcatcggcggggtgccattcaggttggtttgtccctttgttttattttgattttgtctcccagtttttaaaagctgctatcttaaaatttcaaccctgtattttgaaattatttctgcactctaggacttacttgcaagcccaggatttacatttggaaagcgagtggtgtttgattcccactgtttaaaaaggcaacacacgttcgctgatggtctacattccagctgcactagcagtaagctcgcaccaagtgccactgtcctgccaagcactctcctgaatcactgcgctggagtctcagagccacctgatgtgttctgtaccattatacccattttgcaattgggggacacaaactaagtgaggttaagtaacccatccagggtcacattgcttgtaagtgacctgagtgtatattattagccaccaccaggtgctgggcatcgagccagacagtacgggagcaagaactaaaaaaggcaaggaggttgcaatggcaagtagataacacaaaataaaggagggtcatcattatcagcaacagcagcgtcaactgccagacaggtgggagaggccacggggaatcttctgcactgtcccgggccaacctccatctcctcacagctagctgcaggagtgagcccagggaaacccgcagtagagcagcccagccaacccgacagtcagggggaaaaattgttttaagccactttcagtttcgcgtagtttgttatgcaactaaggctaactaaagcactagttttacgagctggaacaaactaatgtcactgaatatctgttttctcctaagtacctactttattgggttgttgtgaggactcactgaaaaactatgtgtaaatcacccagcacaaagtatgtgctcagtgactgcagtcattctttgctatcataccttccatatggaagtacttcctacccacctagctctttaaggagaaaaatctgtttgtgggaaaataattcttttaaggccaaaatcagcccacctttaatatatgcaggacccagggcaaaagtacaaacagagatctgtaggccagatacctaaatatttaaaagttataaacaaagttaacaaatgattaagtacaataagttctaccttcctacctagacaaatataccttgggaattgacatgaaaggccagattgaaactttggatgatctgcacttaaatatgatggtgcagggagaggcgatttccagttcctggtttgcagccacctcctctcttcccacagggctctagtccattggtggaagctcggtcaagcttcccagaagcagctgtcccccagccacctcttgggcacaagagtatgaacaccagagtcagcaatgttcgcccatgggagtacagacattagcagataacactgctgctggcgtgcagacccttgaagcaggctcagtgccatttggggagggaatttggaatttgccttctaaagtgtgggccctggacaagggctccttgggtctaagtataaggacaactactggccaaagaatacctgtgcccacgtggaaccacttaaaaactaaactgaattttacagtaaacacaggaggagccatgctgtaagcatatttattcaaaaacagggtgtcccaaaagtcttcctgcagttttagtaacctcaaggctataaatgctgcaacttataagaacaccatttgaaagttaatttaacactatttatctctgtgaatgttgaataacacgttttaactttaatttttgtttcagttcccctgagtgaaatatggcatacattaaccagaagagaaaattacatttattaaaataattaaaacagagtcaaaagaagtaaacgttcaaatgagttttgtaagtttgtagcatttcgacttaagaagttattaaagcttaaaactgcactgacctttttggggtaccctgtattcggatttgtcgtgtgtcaggttctgtgctagacacttgattaaaaagaaaaaacaagaaaaaagatagtcttctttagggaacttgaagtttagttgtggggaagggatgaaggggacacacagattgatcccatcatacaatataagagctgtaattggggctgataaagtgtgtgtgtgggggaacagaggacagggaccaaatgactctgcccgaagagccaggggaatcctgtcagaggaggtgacttgaagctagacattaaaaaatgaatagccactgaggggaaaggtggcagcacaggcaatgagcaggccacctgcactcaggttgatgctgtgctcttggacagatggactgtgcgacaccaggcgtgttcagggtgggtcgggggttaactaatactgaggttagaaaattagactggagccagcttggaaagggcaagaatgctgagctctagagactgatgttgttcaaaattagtagattgggaagtctgtttccctttttttttttttttttttttgagacagagtcttactgtgccgcccaggctggactgcaatgtcgcaatctcagctcactgcaacctccacctcccgggttcaagcgattccctgcttcagccccccgagtaagctgggactacaagcacccgccaccacagccagctaattttttgtatttgtagtagacacggggtttcaccatattggccaggctggtctcgaactcctgaccgcaagttatccacctgccttggcctcccaaagtgctgggattacaggtgtaagccaccgtgcccagcctggaaatccattttcttaatgaaagagaataaaatagaacaaaatagtacagaacagaatagaaccataggacaggagtatgtgctttccagggaggttgtaactgagcagctattaacagtagaaatttattgtctcatagttctggaggctacaagtctgaaattaaagtgccagcagggccaggttccctctgaaacctggaggggaaggatccttcctcgctgcttctaggttctggtagccccaggtgttccttggcttgtggcagcatcaacccaatctctgcttcagccttccagggctttctctctgtgtcttttcacagtgtctcccctccatgtgtctgtctctgtgtcccaatttcacctatttatgaggacaccaatgacattggattagggtccactctaatgacctcattttagcttgattacttctatgaagactcattttcaaaataaggccacttcactgctgcaatagatatttttagcccttctcttgtattgagaatattcaaaggttggccaacaaatcggtttgcaaagagattcgttaagccttctttgattggctttcctgaaaacaagatttaaaactgtcaggtcgatcacaagcccttgtgttctctgcacctgcatattctagtgaggtttgggtttgttaagccctagtggttcagagcatgggtcagactcagtttgaatctagaaccttgcacctaatgaccataagcaagttacttaatctcagttttctcatctgtacatgataaaaatactattagctatcttgcggtattatcaagaggaagaaataagatagtagtacatataaagtgcttgtcatatataaaggctcaaaaaatggcagctgtaacaataataatggtgatcatgacaatcaagattctaggctgtgactgcagttctttccaactgtctatccaagacaactaaattgtatctggacaccacacaaaaacatgcttctcactgacctatagccggagctttgctgaactccttaaattccagttaagaagacacagagaatagatcatttacacatcttgatcaggtaaatacaattccaattgtctaagtttgtaggtctgattttacatttgcagctgctgccagcaagataaatgtggagctgcaatggaaacaaggggaattgattaaccttgtaggcaatcatgcccctcttggaagtgtctaggtctctccctgcacttgtcaaggcttctatagccattgttccttttcagtgttgttactgatcttcaatggggccaccgggtagcctggaaacacagctcagaggcacagcgaaaagagaaatgtcacagcccccatgcaccacaattaattgttcaataaacacttttcttaaggaacgaagccagatgtgtcacacccacacacttgcaaaacaacactgtgctattaaaaaagggaggggtgggtggtagatccagctgaagaaagtctacagctgttctgcacctcagctataagcattgaaggcttcattaagtgagaagtaggcccaggtggcggtaaccaagctctaagacacagacacatgccctgatcaacttattgaagtgcttcagtctccttgtacttggtaaggaaggggcacctcctaagactagccacaggctacagactccagggaagttgtggataattacatggtaattatttctaataagtgcttccactcttagcatgattatccttccctgggttgcttgcctccttatgcctggtttatgtagggaaacaatgtccaaattaatctacgtcttttgtaagtgagcctatactcctttgacgatccagatggtttagcgccctttagcagcaggtgttaaggctttcttacaaaaggcatattttcagtttcccttcggctatggaaaaagccaggcaaataagacttcggtgatttaaggataaattatgggattaatatagacatggccactaaggacagctgagcaagccctgtgtaaaaccaagagaaataatcatagtgaaactttgtaaggattttatggtttgcccaacactttttatatatatcatctcttttaattttcacatcagccctgcgaggtatatattgatattatgatgaacctgccagtgtgctcaggatagtatctgattaagggcatggccttaggagtagaccgatggcatctgaatcccagctcagccactcattagctgtgtgacctttgctgtgttaattaacctctctaagccttagccttctcatgtatgggaagagaacaccaccaatcctacaaggctgatctgaggatttgacgaaattgtatgtatagccatcaacacaatgtctggcccatagcaagcaggtcattcactggttgaaggaaagacatttgcaaaggacaaacagatagtaaacaaactcccttaggtgaagtagtatttggagtctcctctttttctcttgtttaggttttattttattttcttcgaatggaaatagtggttagtgcaggtgctctgcttactcatattgtgcctatgaagagttgcatgatccaaagtgggttatctagaaaagtgactctatagcctctgaagggttttccagaacttcaagaactaggtcacatcaccaaataaaggaatacaagtaaaatgggcaaaaggtatttcttggtaggaatgctcaagcaattgcataaaaccttatgttgctttttatgcgtggcagctcaggctagactgctcagaacttcttgctgggttaactgctatggatttaaaggattcccccttgattctgagacagctacacctaggagcaccaagcagtgagaaagagaaaaggtgccagaaagccagtccccaggtctctttgttctctattctcagttcctggctaaatctttcttgctttcctcatttgaaaatggaagtcataacaacttacccactctatccacctttactgagccaaggagtctgaatgcactagctaaatgatacagtgcctgtcttatgccacatgtgacaccatgatcactaatgtgatataaattgcctgggcttagtttgttcccatccaccccacccagagatctatcagcaaaaagaaaaaaggaattatcccttcttctcagtagaaaagtgacctgacacagagctgttaaattctgggctcttttgctctgagacggttggaagagttaacgccattttgtctctttcggtgcaccccattgttaagtttctctcagtaaattttgacaagaaacaggcaagcaaaacaaaatacactcgatccttgttattcgtggattccatatttgcaaattctcctccatggtctgaataacaaggacctcagaattctttgcccaaatgtccacaagcttgcttccagagcctgcatgccactcttccttggagtcatcctctatctgaggggtggccaaaggccatgcttacagagctgggatgcacagggaaggatgtccaggagaaggacaggtgtaaaggtagcactctacaccaccatgttgtagcacagaacttcaggaagtctcagaattataaactcaaattgattatctaggttgctatcaaggtatatctttcaaggtaagagggtatatttcatttaacagtttgttccctggtttataagtgttacatatctagacatatggtatgtgggcctctgtgtgtactcttgccccaagcctccaaagaaagaggcaggcttggaaataaataaacatctgttgatttaaactacagttgacccttgaacgcatgtgtttcaactacacaagtccacttatacacggatttttttctagaaaagtgacactgagtgtgtccaccttctctcccacctctctaccttttctggttttgccacccctgagacatcaggaccaacccctcttcttccttcttctcctcttcagcctattcaatgtgaagacaatgaggatgaagacctttatggtgatccaattccacttaatgaacagtaaatacattttctctcccttataattttcttttcttttagacagagtctcactcacttttgcccaggctgaagtgcagtggtatgatcttggctcactgcaacctccgcctcccaggttcaaggaattctcatgcctcagcctcctgagtggctgggattacaggtgtgtgccaccacacccagataatttttgtatttttagtagagacagggtttcaccatgttggccaggctggtctcgaactcttggcctcaagtgatctacctgcctcggcctctctaagtgctgggattacaggcatgagccaccgcacctggcctcccttatgattttcttagtaacattttcttttctctagcttactttcttgtaataatatagtatataatatgtataaaatacaaaatatattaattgttatgttataataaggcttctggtcaacagtaggctattagtagttaagttttggagaagtcaaaagttatatgtgcatttttgactgcacagggggttgacagccctaacctctgcatttctcgagagtcaactgaactaatatctaggacctgtttgtcaccacatcacagcctcatttattctgacagttgcccctggggaggagggtggtgggcttctcattgcagaatctgtggaacaggatgccagcagacagaggaggggccccagccagcagctctgagtaagtgaaggaacaataagggcaacagcagtgtaaatgctggagatcaggcccctctccattcgtatgcagtgaatcagcctctagcatgtctgtatgagctaaatgggtggggcttccccatcccttctctttgcctcccttcacctgtagattttggatgttcctgccaaactcagcaggtgtgagctcaaactggattctttttcaaaaacataaaaagagatgacacttcttatactctagatgtcatgaaacagttcacacctgatcgatatttaaagaagtattattattaggctgggcacggtgactcatgcctgtaatcccagcactttgggaggccgaggcaggcagatttcttgaggtcaggagtttgagaccagcctggccaacatggtgaaacttcatctctactaaaaataaaaaaaattagccaggtgtggtggcacgtacctgtggtcccagctacttgggaggctgaggcaggagaatctctagaacccggaaggcagaggttgcagtgaaccaagattacgccactgcactccagcctgggcgacagagtgagactccgtgtattagtccattttcacactgctgataaagacatactcgagactgggcaatttacaaatgaaagatgtttaattgtacttacagttccatgtggctggggaagcctcacaatcatggtggaagacaaggaggagcaagtcacatcttacatggatggtggcaggcaaagagaagggtgcttgtgcagggaaactcccctctttaaaaccatcagatctcgtgagacttattcactgtcaggagaacagcacaggacctgcccccatgattcaattacctcccaccaggtccctcccacaacacgtgggaattcaagatgagatttgggtggggacacagccaaaccatatcactccatctcaaaaaaataaataaatgaaaataaagaagtattattattatctaaacttgggttgcaccatttcagggaaaacaactacattttaacaacataagttaaaaagccattatcaaaaataaataaatagaactctttccaatgctaagaggaaagacaaggctgagagaaaagaaagaaattaaaaggtattaaatccttactaccagccaaagtcatgctaagtgtatcacacatgaggtcattcagcccttactgtaacccgaaaaggtagatattatattctccattttctaatggatgtaacagaagaatagagatgttcaaacatgtgtccaagatcaaagagctactgagtgtcagaactggaattcaagcataggtctctctgacaccaaaactgccatttttctcacctctttgtctagctgcctccactccaatctgaagcttggaatacaagctttggattcttccaatcatcgtcctgcttccgtgtttttaaatcctgtcctttagcaaggtcaaccgtggacagtcctccctcatcgggagccaggagggtaggctggctggaggggtcctgttgacaaatctcatccttgtgatggattttttttttctaggcctcaggacacctggaaaggcgaggacatttctaaatgccctctgtccttcagaccacatcggagcgtcctgtcagggtctgtgagctgggaaataggccctgagccgatagatctagagacggccacgtgctcttgcacagcctagccagctgtgccccttgggctgttagtgagaaaacttacttttacatttaatattggttttcttcccttaaatcaaaagagtgctgagggataaaccggcgaagcatggtgagagagggaagagttaatgtgtgcaaggtgagccctcagacagagaaaactggaaaaccatatatttacttttgagttttttgacattcaggtctatcttccattcccccactggactcgtctggttttgcctgtgtttagaagttcttctgtggcctgtcgccttccttgcaaatctgttgcaaagtaattacatcttagtattgggatctgtgtttcaaaaatgtcaaaacaaatttcgatgattaaatgccaaaattaagcttggtacttctctaaaattgatatgaaggacacattttaattagaaattataaatctgaggcactgtaccatcaagctacctccaaaacccgaaaactccataaagctctagctctgaggaaaaaaaagttaaattcaatctaaagatggcgatcttgtgaaataaccagccatatgtcatctccttttattggggctgaaattttgccctgaggcatctgaaggaactcagctaaggcatccccgataaaggtcatctgtgagggaaactttgtgggttttttttcctctttagatatctataaacgctaattaaatatgcattattggtgtaattttgaccaaggagctttatgttagtatgaaagcgactatgtattactctccagcacagcttacacaagcattatgctaaattatcagatttttagcttctgcatagctaaagaaaaagtccaagaagtcataattctttatcaaaactgacagtggattatgcacctggagatctatctagcaaaatctgccttgcattctcaacatgaaaatcctgtggctgccagtaggtgatacatctaattttaacacaagaaaagacatctaacaaacatcaaaacaaaagctacccttcgagctcaattttctttttcacacattggtccaccctacccccacttgatgtcagcaggaagtaatctcgtctgtggaaaggaagccagcctcctagctgcaccgacaaattgtagggaaatgaaaaggcttgatgattgctgaattttatccctctttatttccaaaagaataatgaagagctgtcttttctcccacttaacatcctaatcacccacatcagcagtttacactgcagctacccacacctctgagtggggaggaaaaaaagaatgagatgcgacccctcccccaccctgctacacccattggaacctgtcagtactgcatctttaatcaacctcaaaattgcaatccttctccactcaatgcccagcccctgctggtttagggcactacatagcttgcagtaaactgctatccattattcctctatatttagaacttctctagagaaatggcgttatctcagtcactaagctggaaactttaaagttagcttcgcacagtggcttattcacagtctctttcatggacccttcattcaccttgctttaaaatgttcagactgatgcacaactacaaaaatccaaagtatgaaaatatcaccctatggaaaattgactatgatttgcattttgctaatgttgggataggtcaaatgttatttctctccgctccataatgtttcattggagataaatcctactccccttcaccagtgaaaagccactcaatgacctgaacaagatctggtgatagaaaacatattttcaataacactaaactcatttttctgccagaacaaattagtcagtagctatctcatatgtcacagaggtttcaaagaggcacttaggaggatgctaaaaaaaaaatccttctatgtagattattagaaatgtcatgtgctaatgtaaaaatgctccggcagtcctttcattttactcttccttatgaaaatactgtttctcatttgtgattccactcctaaagagatgttttttgaaaatggttccaaagagaaacggaaggaagtgttatcatttagcccagaaaaggcaagatggcagggaggtaatcaaataaaggagaaaaaagacacaatgagctcatcactcctccaaattcccatctccactgaacactggttaagaagaggggagtgggctgtattggtaggaaggtttccttagagttgagtatattaagaagagcatgagttccggaatgaatgaatgtctacaatcaaggactatcttccttcagtgttctttgccatttgaaggaaaagcagtttatagcacacacatattttcttaggacctcagtttccaccatcctataatagagcaaataattgctactttttattgctgtagagcagattaaatcagatgatgtgactaaaacatgtaacatgatgtctgatccataaccaaagaaaactagaggaatgtgtaaagctatgatgtgtgtgggtaagagtggggatagctgaatcctgaaaattcaggcagaatggctcactttattttattgtgtagcctagtctttatgtgataatattgatacttaagtttaccagagaggaaaatatttccttcaacatcctctacgagatctgttttcacatgtgtagagctgactgtatgcctgaataggtgaattatgcatttcacccaactttcttttataatttgagtcattagacatggccgtagagttaacagtttaatataaaagtgttcctggagattttgcttgttctttttggactgtaatcaaatgtgaaagagattagtagtagcagtatttgtgatttcaccctattttaaatatttacagatgcttaactcttagagagatacttctgacattccaacacatttcagctctgtataaacattcctttgggggctttcattttgttctgatagtaaaaattgctagaggaatgtaactgaaaactgatttccaaataagataccctgcggcaatcgaaatatcctatgtagttattatccactgtaaagtacactttccctcagggaatctgctatcagagaaaattaaaacctagccacccattttaaagcccattaagtcattaggtggctcttcagtgttttcctaatgggctacacagcacaaggagccctcccagagccagtgagaaagcattgtgcagactcctgcaagcagatttctttatctgggagtcacagaagtttagacctgagatggaccttgaaaattattcagcttcttccacttgcagaagaggaaactgagcacagaagaggtcacgtggttttccactatccacagctggttagaagcagaataagggttgaaacccaaatgcctgcagcatcctggcatcacagagccttcatggtcttaaaggtgggatgaattattctataccagaataatgttttggatggcagtattggaaaactatctgccttgaaagttgcttcagatgaatgaaaacctattatttttaaaaagtaaagcacttcaaatgtgttttatcatgtaacatgtatgtgttatcattgtagttctcctatgtagagtgatgaaatggggtggctaattcgagaaaacctcttcccacacaagtcttatgcctcctccttccccgcttcgtgcagaggacattttgctcaaatgtcaccttctcagtgagatctaccctgacccccctatttaacctacctcacagcacacatcctgggattactgatcccttttactctgtcctgtctcttcttcaaagcacctatcacctgctgacttactatgtaattcactcattcttatgctagaaaataagccatgaaaacaggaaattattgtgatttgtctcaactagtgtaatgcaagtgcctagaacagtgcctgacataaaataatgcttaagtatttgtggaaggacgtaattaattgtccccaaatggcatcctttgtgtgcccatgggtgcacgtcattttctggttggtggtcatcttctgactagatgtgccctgtccatcagcacacagtgttgtggagagccaatcttcattattatcttgcctcactaaaagttaaacattgtgtccttctggctctctgataaagaaagctcactttcctaagatcaacatggtttcctggccctcataatatttctacatgtttaaatcttactcagtttgctactttctagagtcagttgatctaaaatatgtactggccacccacagtgtgtgaagttggtgccagatgttcacggtgacagacatgagcagtacattctggaacctattagactaatgtttcataaaacttatctgattccctgatgttctcccatcaattttcctgttcctgtatgtggctgacaacgttactggcttatccatgtcattccccttcctgtttggtatctccttttagtttgggcaataatgtacccaggagttgagtcatgtttgaccctagtcagtcatggctaccccttttccctttgccactgagtggtctacaagtgggtgtgtaatccagtcctggtcagtgaaatataatgagaattctaatggagggcttgggaaagatttttctccctgtcagaaggtaggggaagtaccacaatcttcagccctaaccccagcaccttgactcctaatttgggtggtgtgttgtgaaaacgtgatgatgcctggtgctgtggtagccatcttgtgaccatgaggaaaaaccacatatgcactgaggcagagaggaagggctaaaagagcctgggctcttaatgacgttgatctaacaaacccaccctgagaccagtctacctcttgacttatttatcacattcaaatgataatatctattaatcattgacactaggttgatagtcttttctattttttgattaacgtgaaaagctacagattaattttataaatatctgtcacccctgagataatattaagaacaagtgtcattttcttgagtctttcctctgattgagtttttcctgcttttttaaactttaatttctcacccttcttttcaactctataaacttattttctgtataatacctagaagctacctgacttcttaccagatattatcttaaaccccttcgttctaccttatctatgatgagcaagatagaggaaggtgctcaaggttaggggaaaaactgaaatgttttcaacattagccttgaccaggctcatgtcttagcacatgagggtttgtgcagggaaactgaagcaaaggaaggacagcatggttactctttttccagtcccctttgaaccccgttaccaagtgaatcttcctaaaacactccctatagcacatctttctcctggtcaggaaaacctaaggatttcactgagcctgccagataagatttcaacagttttcttagcatgcagcaactttcacaatctacacccaacttccctttccagctggaccccctctacttatctcgaaccccacatttttgccagttgggtctgtctattcactttaacttttcatacccattcatgctcctggtcctggttattgtggtcccggacctggaatgatccctaaccaaattccatgtattctctaagcctctgctattcagtaggtaaccacgatgggtagactggccttttcactgaatttttaatttaaatccatttgaatttaaaaatagatacttaaaaattaaaaacttttgctttgtgaaagaccctgttaagaagatgaaaacgatgagccaccaactggaagaaaatatttgcaaatcatatgtaaaagatttatctatagaatatataaagagttctctaaagtcaacagtgagaaaacaatctgatttttaaatgggccaaagagttgaacagacatttcactaaagaagatagacagttggcaaataagcacatgaaagatactcagcatcactagctatcaggggaatgtaagttaaaatcaccaagacagatcacttataaacctattagaatagctaaaataaaaaatactaataataccaaacactggcatggatgcagggaaactggatctctcagacatcgctggtggcaatgttaaacagtacagccactctgggcatctggcagtttcttaaaaagttaaacacacatttactatacaactgaacaacagtacctctgggcatttatcctaggcaggtaaaatcttatattcacacaaaaactgttcacaaatgtatgtgtaatagccaaaaaccggaaatgacccaaatgctcttcaaaaggtgaatagttgaacacacaaccatatagtagaatactattcagcaataaaaaagaaacaaactactgatacatgaaacagctagggtggatcttaagaacattatgatggccaggcgtggtggctcacacctgtaatcccagcactttgggaggccaaagcgggcagatcacctgaggtcgggagttcaagaccagtctgaccaacatggagaagccccatctctactaaaaatacaaaattagctgggcatggtggcgcatgcctgtaatcccaactacttgggaggctgaggcaggagaatcacttgaacccggaaggcggaagttgcagtgagccgagatcgtgccattgcactccagcctgggcaacaagagtgaaactccatctcaaaaaaaaaaaaaaaaaaagaacattatgacaagtgacaaaagccagtctcgaaggattacacattgtatgatctcatttacacaacattcttaaaatgacaaagttgcagagaaaacagataaatgaaatggctgccaaaggttagggaagaggagggagagcctaactataacagagcagcactaggagatcatttgtgtgatggaacagtcctgtatgttggttgtgattgtgcttaaacaattctgtacatgtgataaaacgttatagaaatatacacagagacagataaaacatttgaatacatataaataacagtgaaatatgcatgaggtgtagttaattgtaccaatcaatatccttgttttgataatgaactatagttatgtaaaacgttaccatgggttgatggattcatgggatctgtttatactacttttactccttatgagtctgtaattatttcaaaattaaaaattaaaaaaagatactcaattctattatgggaaaatttttaagcatgtttgatatatgaatctgtttctccattgtaaatgttattaaatctaagacgtgctacaagtgtaaagtatatactggattttgaagacttagtatgaaaaacattgtaaaatacttcgcttatagtttttatattgattaaaatactctatattgaattaagtaaaatatattattaaaattattttcaaccttaaaaatgtttaaaaatgtgtcttttagataatttaaaattacatatgtgattcatattatatttctatttcctgctctaagcaaagaatatggtaccctgaaaattgacacatatgttaatgggcatatgcatatgagcaattattacctaagagacaatatccatttttttttacaatcttattaaggtataactggcatacaataagctaaatataaagtatacaatttgatcagtttcagctatgtatgaacccatgaaacccatcatcacaagataacaaacattctcattgcccccaaaagtttcctccctcctgccatctctgtcaccaggcaattgctgatcagctttccattactatagattagcttgcatttttaaaatttttaaataaatacaattatattaattggtatctttcactttgtgtagttactttaagattcatctatgttatgcatatcaatagttcactccttttcattgctgaattcattgctgaattggactgaaatatatttgtccatttacttgttcaaggacatctgggttgttcccagcttttgactattacaaataaagctgctgttaacattcgtggacaagtccttatgtggacatatgctttcgtttctcttgggtaaatacctaggttgacacatatagtagagaatgtttaacttttcaagctataaaattgttctcaaaagtgttgtgccattttccattcccaccagcagtgcatgagagttttagttgctccatatccttcccaacacttattgtgtctttttgattattgccatcatgctaggtgtcaactcaccgtgatttaaacttgaattttcctaatgactaatgatgtccagcatctttttatgtgcttatttcctgtttgtacagtttcttttttgtaaaatgtctatttgatttttgcacagtattttaattaggttgtttctcttcttattaagttgtaagggtttattttatataaaatgcaaacccttcataaaatatatattttgcagataattttgcccagattttggcttgccttttcatttcctctttttcatttcatttcatttttttgaagagcaaaagtgttcaattttggccaggcacagtggctaacacctataattccagcacttcggggggctgaggcgggcagatcatttgaactcagaagagaccagcctgagcaacatggcaaaaccccatctctactaaaaatacaaaaattagccacgcgtggtggcatatgcctgtaatcccagcatccctggtggctgaggcaggagaatcacttgaacctgggaggcggaggttgcagtgagccgagatctcaccactgcactccagcctgggtgacagagcaagacctgtctcaaaaaaaaaaaaaaaaaaaaaacaaagattattatttcttcacccagtttccctttgaaagaggtcaactgatatatatgtgtgggtctgtttctaaactttctagagtgttccattgatctttgtatatctatcattatgataataccacactgtcttgattaccatagctccatgataaaccctaaatataaactcaagtgtatagtgtgagttctacaactttattctttttcagatgtttttgactattctacatcttttgaacttccatataaattttagaatcagtttgtcaatttctaaaaaacaagcctgctgatttttttattggcattgcatttaatctaaagatcaatgtggggagaatagatatctaaataatatagtttttgatttatgggcatgtatatctcatcttttcaattatctcaacaatgttttatggtttttgatataaaggtcttgcataagttttcttcaaaccaatacttaagttcatattttctgctattttaaatggtatttttattgcaattttggattgatctttactactgtatagaaacaaaattgatttttatatattactctttatcctttaaccttgctaaactcactgaatagttccaatatttttgtgtgtgtaggtttcttagattttttttaaatcacctatactggttcaaagaattttccacagtcatgttgtctgttaatagagactgctttatgcctttctttttaacctgtatgcctttgttatttctttttctttcattaatacatttgccataatctttgttacaatgacaagtagaagtgatagaatggatatacttgcactgttcttaaatgaaaagcattcagtctttcaccattaggtgaggtgttaactgtaggcttttcatagctgccctttatgtggttgaattttcttcttttcttttttaaattttttcatcatgaatagatgttgaatttttgtcatatgcttttctgcatatattgaggtgaccatatggtgtttctttttaagtgtattaatatggtgaattacatgggttgattttcaaatgttaaaccaaccttgcattcttgagataaaccttttatttggtaaaatttataaacagtgtttgtcactatgttcacaggggacatgatttgtagattttcttttcttgtaatatctttggttttggtatcaaggtaatgctggcttcatagattgagttgcaaagtgggtttttgtttgtctgtttgtttttagacagggtctcactctatgcctaggctggagtgcagtggtgcaatatcagctcactgtagccttgatttcctgggctcaagtgaccctcctgcctcaccctcccaagtagctaggaccacgggtgtgtgccaccacatccagtttttttttgtttttgtttttgtagaggtggggtctcactatgttgaccaggctagtctcaaactcctggcctcaatcctcccatctcaacctctcagaatgctgggattagaggcatgagccactgcgcccaacatggatagcaaagtgttttatcctctttgattttcttgaagttttgtgtagaattgatattctttctgatttaagtgtctggtagaattaaccagagaagccatcttggcttgatgtgttttctgggtttttgtttgtttgttcgtttgtttgttttatggggaggtttctaactataatagctttatagttagaagcctttaataactttaatagctattgagctatccaggtaatctatgtcttcttgagtgatctctggcaggtggtttctttcaaagaatttgtccattttatctaagttgtcaaatattatggcaaaaaagatggttgtaatattttcttatacttttagtatctacaactgtattggtatcctctctctcatttctataattaataatttgtatcatttctatttttttcttgatgaatccagctaaaggtttatcactcactgatctcaaaaaaccagttttttattccaatgatattctctattttttgtttttctatttcctgtaccttcttgaacatttgaaacatatttataatagttcttttaatgtccttgactactagttctactatctgtgtcatttttgttctgtttccattgactgatttttctccacaatataagatatatttctatgcttttttgcatgcatagagtacatatactgtatatgtacaagttaaagaataataacaaagtgaacaatgtttacaactccaaacaacttgacgaaaagaatattatcaataccttaaatctgtccctggtaacatccctaccttgatacactcaaagtgtactcaaaggtacaatatcttgaattttgtgttaaactaacttttaattatttatttttgcttaagtatgtaatcctaaaataatatattaattttaacttttttagacctttgtcaaatacaataattctaggcttacttttttcattcaatatgtttctgaaattcaaccagatgaacatgtatctgttcattcatattctatcctaaatggtatttcattaaatgaatattcaaaaaattatccactatctgcggacatgagagctatttccagtttttctttttgcttgtttgattcgctggtacaaacagtgcttctatgaccatatttgaatatgtctttggtgcacatatgcaaaactatttctaaagtatgtatcttagagtggtattgctgagtcgaagactatatgaattttcaactttgctaaataacactaaattgttttttaaagtagtggtaccaatttactcttcagtcaaaagtgtgtaagtgtttttattgctctacatcttcaccaatatttggttttgtcagactatatagttttgccaatctgatagaaaaaaactggcatctgtgaaagtcatttgttttccctaaacatttccagttttctctgcttccaagcacatagtagaaggaattgcacttcctaaatccttgttatgagtgagtttgacttgtaatgaattgtgaaggaatgtctgccagctcctggctggagcaattacttactgatgcaaaaacccccatgctttccttccctctgacaaggaggcctacaacatcggaggtaactgttgtgtgaccctgggaacatgagtgatcataatgaacagatgactgaccacagttcccagatgacctaaactggacatttgtgtgagtgagaagtaaaattttgttggtatgattcttgggtgttggtggcaacaatattacctagcatatcataacatacagaatatctcattgtggttttaatttgctttttcctgcttactaatgagactgcacatcttctgacgtttggtctgggcatttttttatttcataaaatgtcggtttatttgtttgtttaaaccatctttcaatgggtttctttgtctttctcttattgatttctagaagttctttagacattttggattctcatcttgtgtcagctttgtttcaattccattacacaatttttggtttttcttttaatggttcttaaataaaactttttatcttagaaaatttcaagcatacaaaatagaatattctaataagcctccatgtagccatacccagcttctataattatggactcatagtcaatcttttttgcatctgtaatctctacccattcctcccacccctggattattttgaagaaaatgccagacatcctatagtttcatctgtgtatctctaaaggtaagaactctttgcaatttggaggtccagtgttatgtgagggtctctgttccaatcccccaacctgtataggctgaaagctttccctcttccccctcaaacctcagctgtaggcttccagggagagtttgtgtctcagctaatcagatggctaaacacacttaaaaactatttttccattatattatgctaaaagcactagaagtaatttagtttagcatgtattcatgttgtttagacatgtactactaagtatgtattatgtgtgcatgatttttacatatgcgtgtttaccactatccatttaatctataagcttctaagaggtatgaactatttctattcgccatgttttaagtaatacccagcccaatgtgattcaaaagtaaatgtataataaattctatttgatgaaaatggaagtcctggttattagaatatcatgaggaaaatggactcaaattgtggtttgattttcataggcaattctaatggatatataagaaatttatctcccatagaataaaacatggaattttccccattttattcatttcagttttctttctttcatacctattctaggtggtctatgcattgtatattcagtactgtttttgaaaggcatgttactcaaaatacatggttgtactacgaataaatgcactatgctgatattaccattgtagaagattctgggaagaacattctattattcaatcccttaaaatatatcatcctattgagttgcttcttctaaggcattcatgtacagtgtgctcttttagagtttaacaattccattttcatacccctctaaacacaccattttaattatttttaaaaacttaccattagtgatttgtcctattttgtttttatataaatgtttatatacaataatgttatgttaaaaataaatacaactgttttgttattgttatattatctttcacttaaacaagaggaaagggagattaagtagctgacggtgtactgaagagtaactgaaaagaccaaaacaggaccattggctttttctacctattcttctttggcttctgccttttcatgtcctatgtatggctgccatcatgtgctgctctgtcttttcttctcagggcctgcttgacacatttgatccagaaaagcttcttcctcccttctgaccactgtttgctcagtcagagctggtgtgcctatagaccttcacatccttattccatggctacctggcagggataagatgtatatatatatatacacacatatatataagtatatatacgtgtgtgtgtgtgtgtgtgtatatatatatgtatatacaggttgctgctctgttgctcaggctggggtgcagtggcgccatcatagctcattgcagccttgaacccctgggctcaagtgatcctcctgcctctgcctcctaaagcactggagttacaggtgtgagtaccatgcccagctgtggtgtccttttgatccttgtatttggccttcttgactaatccagtgctcccagacttctagcagaagcccattctctggaggtaaactgacaggaatcctatggggtggagggggattccctgagctcttaaacatggtcctaaggtgcttccttggctactttatgtttaacaatagattgctggtgatactgatgaaactcttcttttgttttaatatctgacaaatttcttgctaatcttaattactagagcaactctagggaacagtgaatcttcaaacacaagattttaatatgctttccttcatgtcagtgttccttttatgcatacctctagtaaaacattgttccatttgatgccaaagatttgccctttctttaattaattttgaatactgcacatgttagattttcccccattattcatattttctccaattgttcatctggggacgaatttaagtaatttgtacatgtccttagtttaaaatgggttttgtacattcactgaatattttgaagaaaaatcaaccattacatgacaaatgtatgtcttctagaatttttatttctaaacttcatggaacacttctgtgtgactttctgtaatatctaatctcaggcaaaaatgacttactgtattagtctgttttcacactgctgataaagacgtactcgcgactgggcaatttacaaaagaaagaggtttaattggacttatagttccatatggctggtgggggggcctcacaatcatggcggaaggcgaggaggagcaagtcacatcttatgtggatggctgcaggtaaagagagagcttgtgcaggaaaacttccccttatagcaactatcagatctcgtgagacttactcactatcacaagaaaaacatgggaaagacctgcccccatgcttcaattacctcccacggggtccctcccacaacatgtcggaattcaagatgagattagtgtggggacacagccaaaccatatcacttacacttctctatgactcagctgatttattaaaaaacgactttatgagatgtgtcaattgagatggaaggtgctggacataatgaactgccggtttccccccagttctgactcttgcctgcagagccctaacattgcttacatacgcactgctctttcacatgaaggaacagcgcagacatcacctaatacgcgtcctactgtattctttctgccacattcccagaaaccccaaagctctttggaacacccaggggatttcacaggtctataaagaagaacaacctgtaaactgggcttggtgattctgtggggatacaaaccaacataatacatatgtaatggaataaacaacggcattagccagttcagagtcttcaagctgaacttgttagaaggagcgccacacctcaagtaaactaatagggtggggatcccagacggagaggattctacccagaatcctcctcaattcagccccgagctttctttgaagggctttctttgtacagagtttaaggtcagagacttttaacgtggaccggaaagacaaactctaataccttaaggggcactattaaatcaaattccacaaactaaatacttgtccggagatgaacaattcagagtatagcagttgttgcaggctaaatccaagcatatgacataatttagaaatctaccagtgtgtctccagagaatgcattttcatttttccataatataatacatgcctatcaaatccatctaacattattgaatccatcactttttaagaaatgaagttgttgtagctgaagctttcaagcatgccgtcacatatagttcttacaaatggacttacgaactgatttggagggaagcccccaattcccatatgtttgactttaaagaacaatccagctgtatctgaagtaattgtcctcctcaacagagtgcacaatgcagggtgcagtgggtggtacacaggagaaaaaactcatggaatggtggagacagccccctagtcagccagatgggccaaatcagatgtagggtcagcagtatcacgtttatacgcttggattacattgccacctagaaggaacccagggagtacctaggtttccatatatggggggattcctgcaatgattcagtcctttaatggggcatcttactgtaaatcattaaaacagcaccacctactctccagcatccggcccactgagttcttgaaagcatggttgctgtgggcatcacagctgatttctgttagttgactggtctcatccagttgaccaacattctgcttcaggaacattgtgacttctacacctaggctcacccttggttatgatagcatcagtgtctaaagttttcttaatatgctgtaacaataatctctgtctcatctatcatcatattgccacccatttatcatccaaaaaaaattattaaaaataaccaagccttcagattcaggaaaaccattggaatcaatttgatttcccttgcagttgggaaatgaattttaaattattcatgttaacaccctccagataaattgaatttttagaatatttaagaaaagcttagtaaagtccatctttgacattaacagattcctttttttaaatattaatttcatattaaccattgctttttgacatacagtcatctgaccaacgatttcaagaatcattaatgttaattgggaaagaagtaaaaccttaacattttaatattataaaactttttttttcaacttctgtttccagctgtatgactcactagatatctggagaagcttttctgccacttaaaaatgctggataaggccgagtgtggtagctcaccagcgttttgggaggccgaggtgggtggatcacctgaggttaggagtttgagaccagcgtggccagtatggcaaaaacctgtttctactaaaaatacaaaaattagctgggcatggtggtgggtgcctgtaatcccagccactcaggagcctggggaaggagaatcgcttgaacccaggaggcagaggttgcagtgagctgagattgcgccaatgtactccagcctgggtgacagagcaagactctgtatcaaaaaaaaaaaaaaaaagctggatgagatagtttttaaaaaaacatttttaaaaatgcacacctaagcttataggaaagtcaaggaaatcttctaaggccagaaagctaagcaggaacccagaggaaaaaaagccctgtagctggcattgccctgaatgcatctgccaggtgctggtagcctcgagtgggggcctaactttctgcagccatataatttatcctccagcccacagtgattatgaagtgaaaggtggtgctattaataatacatgaggatttctgctcctgcttggaatatagaaagctacgagagaatgtcacccccatcctaacaacaagaaaatgaggaacagtgtacaatattataactttctttccttaaactcatcagagacttgaggtcacaaggcaaccaggaaagtaaacttcaaaggataaaaagcatctctaatgagaggcaggatatgaaattgttgcacctttggcagagtatgggaggaaggagggggttgttgccatggagtgagtaagaagaaatatttttttaaaaataatgaattccttactttggcaggctgaggcgggcagatcacttgaggtcaggtgcccggcctgtccaacatggtgaaaccctgtctctaccaaaaaaaaaaaaaaaaattagtcgagtgtggtggttcatgcctgtaatcccatgtaattccatcttacttggggggctgaggcactagaattacttggacctgggaggtggaggctgcagtgagctgagatcacaccactgcactccagcctgggtgacagagggagactgactcaaaaaaaaaaaaaagaatttctaaagactgagtatgcactcatatctcatattaatttagaataattgagaggcccagacacaagcggagttcacacacactcccaagcttctcttcatagtctccatggggaagagggggtgctcttgaggaagactagggcagggcaaaaggctggagagacccccccgtttggtggcacaggatgcaggaggaggtggctgcccccacaccttgatgctcctctcatgggagcaaaagccttaattaagctgtcaggaagaagcagcaagcccttgagaagcaaagccctctgcctctggaggggggccagcaatcccgtctttccatattttggtatgcaggcacatatctgcttctggggaaaggacagaagcaaaagtcatcagtccctgaggagagacagtaaagcttttcgaggcctggaggctacaccagtacatagccaaggtctgcttctcccccaagagggacaggaacctgtccagacaagggacaggttgctcagctgattagccatgggggcacaaagcaggatggaacatggtagagtggatttggaaggggcagaaagaaaatacccaacacaatgattaaacaattttgagagtccaggtgcagtgactcacgcctgtaatccagcactttgggaggccgacttgggcggatcacctgaggtcaggagttcgagatcagcctggccaacatggtgaaaccccatctatgctaaagatacaaaattagctgggcacggtggcacacacctgtaatcccagctacttgggaggctgaggcagaagcattgcttgaacccaagaggtggaggttgcagtgagccaagattgtgccatcgcactccagcctgggcaaaaaagagcaaaactccatctaaaaaaaaaaaaaaaagaatttttagagagatacaggaacaagaagctagaagagagagagacacaaaataaacaaaattctataaatgaaaaatataaaaattgtattcatctcagttgataagcagcagattagataatgatatggtttggctgtgtccacacccaaatctcatcttgaattgtagctcccataattcccatatgttgtggcagggacccagtgggagatgattcaatctttggagtgcttcccccatactgttctcatggcagtgaataagtctcatgagatgtgatgatttctttttctttttcctttttttttttttgagacggggcctctctctgtcacccaggctggagtgtagtggcacgatctctgctcactgcagtctctgactcctgggttcaagtgattctcctgcctcagccccctcagtagctgggattacaggcgcatgccaccacgcctgactaattttttgtattttcagtagagagggggtttcaccatattggcaaggctggtctcaaactccagacttcgggttttctgcccgcctcggcctcccaaagtgctgggattacaggtatgagccaccatgcctggctgagagctgatgattttataaggcatttcccctttcacttggctctcatactctcttgcctgccgccatgtaagacattccttgctcttccaccatgattgtgaggcctccccagccgtatggaactgagtcaatttttcctcttatctttgtagattaccaatcttgagtatgcctttattagcagcatgagaacagactaacacagataaattgattgatagccaacgggaaggagagtagtagaagataagttacccaagcggagcacagggaaaaaaacaaaacaaaaaaacagtgaaaaatatgaaagaagggttaggaagtattgagtgagaaagtctaacatgtctaattcactgacattttaggacagattaggcaatattcaaagagatcatgactattttccataattgaaaaaaagaccagacgggcgcggtggctcatgcctgtaatcccagcactttgggaggccgaggcgggaagatcacaaggtcaggagatcaagaccatcctgactaacacggtgaaaccccgtctctactaaaaatacaaaaaattagccaggcgtggtggtgggcgcctgtagtcccagctactcgggaggctgaggcaggagaatggtgtgaacctgggaggcggagcttacagtgagccaagatcgcgccactgcactccagcctaggcgacagagcaagactccgtctcaagaaaaaaaaaacagataaaagaaaaaaaagaccatgactatttatttattctgactacaaagatccagaagagaagtcaagaaggccaataggtcctgagcaggataaataaaaataaagtcacatttagatacactgtaggaaagcttcagattcccccaaacagagaggaaaaagaaaaaaaaatgccaaaaagaaataataactagattaatagtggacttcttattggcaggaaaacatgtcagaacacaatgggtatgtcttcattagcagtatgtctcttcaaattgctgaaggaaattaactgtcagcttgaatcctatacaaatctaactttgattccaaaggaaagacaaagtaaagacatttatagacaaaaattgaaagggattactactaagacacccttacaaagaagctttaaaagggtattttttaggaagaaaaaagaatacagaaggaagatctaatatacaagaaagaattttgagccaagaaaatgggaaacttctgtttaaacctaaattaacgttgacagtataaaacaacaaataatggctaacttctggtgtttaaaaaacgagattgagctgaaatactagaaggaagagcatataaataggaagccaggaaggaaagggaaagcaacctcttgctctttcatcattggtcagaatggtaagaatatggataaacattaggcttcgttagcttatatgttaaaatgcctaggttaacttctaaatgaatagaaacagtgtttataacttccaaataaatacagagaaaatgggaatgaaaaaaaatcatttaatacaaaagaaagcaagaaagagaggggaaaaaatatagatggaagaggcaaatataaaatagttatctccttaagataaaatatttttagtttagtgaacattgtcttctagcacagagacactaaaaaatttactcactgggaaacttattcctttctaatcttcagattgcttaaagtaatttatacctatataggagatctttttcttttttctttctttttttgttttattttgttttgttttgttttgttttgttttgttttgagacagagtctcactctgtcatccaggctggagtgcagtggtgctatctctgctcactgcaacctctgcctcccgggttcaagcaattctcctgccgcaatctcctgagtagctgggattacaggtgcacaccacaatgctgggctaatttttgtatttttagtagagatggggtttcaccatgttggccagcctggtctcaaactcctgacctcaagtcatctgcctgccttggcctcccacagtgctgggattacaggcatgacccaccgtgcctggccccctcacttttttttttttaatttactggcttttcctctgtcccctcattttttctctctctcttttccttcttccatctgtttatctatctgtccatctattaatatctacctatttatctatctgtccatccatccatctgtgcagtcatccatccatccatccactttaccagctataccccaaccctctttacttctaaacacctacccatctcattatgctcccacctatctatctgttctttcattcattcactttataaccaaaatctttttttccaacccagacctctctccaaaccttgctacttgacatctccttagacatttcataggtgcctcaaacttcacatgtccgaaacacaaccctcggttccatccccacacaaagttccccctccccaagccctcaccatcacagcaagtggcaccaccagccatttaactgctcagctaaaaacctaggagtcaccttgatgattgtttatctcatgcctcacattccatcatcagcaagtgttgtcagattctaccctaagtctgatggtgtcttgccatctccactgctactatcctctgtccacaccatcagcctttctttgaaaccactggaatagtcacatagccaccgtgcaccctgctcttcttactatccttttccatagctgccaaagtgatcttttcagtatgaatcagaacatgttatccccttcctaaaagcttctgtggcttcccattgtgtctagaaataaacagaaagtctccactatgacccacgtggctgctaggatctgacatctactcagcctctgacctggtcttcctctgcgtgcggtttcattcctttgacgccagctccactggccgcctttcctgttcctctaacatgcccagctcgtgtctgactcagccctttaaatctgctgttccctcctccagacctgcaagatcaagtctctgctgaaatgtcacatcctccgagagacgttgcctgacatgctgttttatgttcatctgaacacatttttcagcatttgaagttatctttttaaaaaaagcagttcattgtctgtgcctcttaagggcagggactttgtttattgttatattctcagggtctatacctatgcctggatcatagtaggggctcagttattgtttgttgaatgactgtttggcattaattaattaatttcacaacttggagtggaattagccatctgcattcatatgaaaaatgacttaaatccctatgatatatcaaattaaggcaaataatcagccaataaaaatgggtttgccacaaatttgaccaatcaaaggttaactactatgtaaagagttattacaaactaataaaaagaacactaacacaccatttaagggacattatagtccaggcaggaccccacctaccagagctaaccagcatttgcacctcctcagttatggttttgaggtctcctgcctccttaggattataggggacccagcatctctcttggtgtcagaaaacaggaggtgatcctccaatatcatgctgacacacttacagtcctcatggaccctttgaaaacagcccctccattttctttttgccaagcttgggcataaggcttatttgtgttaggccatgctgccatcttgggagaacccttcagaaggctccatcccctcacacagcactgcatgagagtgggcatgggatgccatccttaagaaccaccccatcccacgccaagtcatgaggaagagtgctcccttcactctttgctagatcagttctgccttccttcccacacagtgtcagccttcttcagtcagccttgttgaagaaaagactccagaatgctctgcacagaaactcaggctgaagttttgcagtctgagaattttttgaccactctcagatgctagaaaatccaggaacccagactcaacacaaattcttcaggagtgagaaggaaagattctgatacttgtcctaagtcttcttcataagcaagaacaaggcagatgttagtaacacaaatgattattttgctatatatcctttgccaaatagaattactctgatatatgtaaataaatattctcctttttctaagtagagaaaccatcaataattaccaggttttttatttctcaaattacaaaatacttaatagctattctattttatatcaatgcaaaacacgggtaagaactggacatttgtggaggggctatatagcatttatgaggttcatttgttttcttatgctttgcaaaactgagttagtgcatgtgaggatttatttattattgcaagcaaatcaacttaagtattacaaacaaaaaatctggtcactgttattttgaaagcattaagataacttacattgctaagcattctattgatcttttgctatttgtcttgtattttcaaatgattatatttccctgcagacagtggaaatatcaatgagaaataagatgtcctttcatcaatgatgtaggttatttcatttccaaatattcacatattatgcttacatgtgtttcattcttaatattccgaagtcaatctgttccccaatagtttttttattagaaaggaaaatatttcacatcaaacattttaataatattgtgaatcaaatttagaatatttttaaaatgtgataacgtaccaatagtgacatctaggccgggtgtggtggctcacgcctgtaatcccagcactttgggaagctgaggcgggcagatcacaaggtcaggacagattgagaccgtcctgactaacacggtgaaaccctatctctactaaaaatacaaaaaattagccaggcgtggtggcacatgcctgtagtcccagctactcaggaggctgaggcaggagaatcacttgaacctaggaggcggaggttgcagtgagccgagatcgcgccactgcactgggcgacagagcgacagagcgacagagcaacagagcaagactccatctcaaaaaaaaaaaagtcatctaaattgatataaaaatgacttaaatctgtataaatcaaattaaggcaaatgatgagccaataaaaatacctttggcacaaatttgaccaattaaaagttattataattactatgtaaagagttattacaaactaataagaagaacactaacacactaattaaggggcactagagtccagtgattaagagctcaggctctggagttagagctgggttcaaatccaggccctgtcacattctgtgtgatgttggacaagactcgtatcatccgtatacctcttggagttctaatttgtaatatggagataataagcatgactgcttgcagtgtaattgaaaagagtacgtaagatcatacataaacaactcttggtaccaatcactggtacccagtacttactattattttgccaaaagagatgaataggcagtttgcaaaagaagaaatacaaatgactagtagacataagcaaaaagttaatctccctagtaatcagttagatacaaatgaatacagcaatgggaggccattttttcctagggaatttgtgttttaaaatatattctaattctcagtcatgatatatgtggtgagttctggaatgaatataaattcagacaatttttccagaaggcagcttggcaatttttatctagtgctttaaacattttcatagcctttgaccaaggcttcagctattgctctactccagcaggcgttactcacattgtagtttgaactggggctcctggcagcaacatttatatagaatatactgtgtttggtggctcctagggttgtgcagctggtgcccatgccactgacgtgttcaacttacagcaatcaagcctaagaaaataaacagaaaggcacatatagatttatgtgtaaggaagtttgtccaagagtaattcagaaaaagccaaaaactgtgaaacaacctaaatttcaatcaatggaggaataacaacatgaattattgtagattaatagaaaggaattttatattgccattaaaagtcacattaggaatctataagacataggaaataattgtacaagttcattccaaaaggaaagtagctttattatggcctccaactagaaaagtaaaatgtattcattttaaaaattacacaatctagaaaaactaaataaagtagacactaatgatcttaacattccaaaatagacacttttttatataggtcctaacaaactttttttccacatgaatgttcatattgctatgtaatgtaaactgcaaaaatcaggctgctaaactgctaattcctaagggggggaaaagtacctaagtatttattcatggtggagggaatatggatgatttctttttttgttttacttatctcttttttgcctctaacatatctacagtaagcatggattactttataagcaaaacatcttaaataacataaatgctgtaaatgactttttcttacttaaattataactatttctttcagtgctctgaaagatggaatattttttaaaaagacaatattccttttgcaaaatgagaactaacactcattaatcactctgctgtcttcctcttaatgaaaacctgcaaatgcatatgcaaatgaactgaacttctattataagatggtgacaggatgctctacagaagagaaggtaatgatagagtttgaaaaataggagcgcagaggaaggttagcagtggtggaatctttctattcaatgccttaaaagagttgtattaatctgatagtgttccacctaccaataatgaaataagatcataagcagcagtaaaaagcaaaagctcctcattgtgatatgacacatagagtgtagcagaatagggctatggggacccagatcaaaaagaaaacgtagaaagttgtaatattcttcagacattttcataagtcctgccagatcatcctatttaactacttgacaagtttagtctgtattacccacgttaagcctcctagagtatttttatccaatatcacacatttggatcaaaactttaaaatatcaattcaacgttcaaatactttgtctacacaattacgtacactcatgtctaaaaatacaaattgagtaaacccaatgtccctcaagattgttagcattcagcagacaaagatttaatgtcaaaagagggtctgaagcattaaggttcttaaatataactgtcccaaggagaattggaggtaggcttataggaaattaaattccttggacagggtagatgagagtagagacagcatcctattgtgttaatcccgtttttgcccttttgtgtggaaaatcatgacagcctgctgcctttaaatggcttgagaatccagaacaaagataaacactcagctggattctacatttttgaaattctattacaggaaagattcttgggttaaagaagggatatatgaaaacagcagagcaccattgctgccctccagaatcttcccattatatgagacaggtacgaaggcaactggaaaacatggcagacttttttttttttttttttttgaaacggagtttcgcttttgttgcctaggctggagtgcaacggcgcaatcttggctcattgtaacctccgcctcccaggttcaagcgattctcctgcctcagcctcctgagtagctggggttacaggcatatgccaacatgactggctaattttgtattttcagtagagacagggtttctccatgttggtcaggctggtctcgaactcccgatctcaggtgatctgcctgccttggcctcccaaagtgctgggattataggtgtgagccaccgtgcctagcctttttttttttgagacagggtcttgctctgttgcccaggctggagtgaggtggcatgatctcggctcactgcaacttttgtctcttgggttcaaacaattctcttgcctcagcctcccaagtagctgggtttacaagtgtgtgccaccacacctggctaacttttgtatttttagtagagacagggtttcaccatgttggccaggctggtctcaaacttctggcctcaagtggtctgccggtcttggcctcccaaagtactaggattacaggtgtgagccaccacacctggcccagaattttttaagtgctgaattggtggcattctctagagaaagagaaccaataagagagatatatagaagatatatgtataggatatatgatatatgtagattagatatagattaataggagatacatatgcagtcagctctctatatttgtagattccacacccatgcattcaaccaaccaaaaatgttagaaaaaacaataaaaattacaaacaacaattaaaaatgatacaaataaaaaacaatggggcataacaacgagttacatagcatttacatagtataggtattgtaagtaatctagacatgattcaaagtatacaggaggctatgcataggttatctgcaaatactacactattttatataagacacttgggcatatgcagattttgatatctgagtgggggttctggatccaatctcccatggataccaaaggactactaactgtacagaagatacagatagatgatagatagatagatagatagatagatagatagatagatagatagataaaagagatatttatagaagaaatatatataggagatatacatatacaatctatatataagatatatagtggatatatatgatatatatatttaggaatattatatatggtatatctcatatctcatacatctatgtatctcatatatatatttatatgagaaaatatatgactgtatgagatatacagataagagagatttagtatatgcaattggctcactgattacggagtgagtcccagatctgcaggatgacttggcatgtaagagacccaggagagctgatggtatagttcctgtcaagacagcaggctggaaccccaggaagagccaatgtttccgtttggatctgaaggcaggaaaacagctgatgatcagtccaaaggccatcacaagagttttctcttactctcaagggagggtcagcctttctgttttctccaggccttcaactgatgtgatggggcccatctacatactgggggaaaatctgtgttactcagtgttctgatttaaatttaacttcattcaaagacacacagaaacacccagaaataatgtttgaccacatacctgggcaccccacagcccaatcaagttgacgcataaaattaagcatcacacctgagttaaccactgtaaacattgtggttgacttaattattcaccctttcaatgccagccctgaggaatgggagtttatgtggataaggacaaaaatctttgggcataaagagtcagctaaaatactttcgcctctctgttgctgccaccattgagagtagatgtctctaagtgcatttgtctgtgataccccctctttctgtccaagctgagggttttattttcatatattcagaacacctaagaagttgtgagatattttttctccaaaccaatttttctagctgtggtgtgaagtatttctcaggcataaacatcacctttcaaccccatctgaactgaaaatcccatttctaatcttctttatgattgagaaatgatagagtagatttgctggaaaacatctgcctcactgacagctggctgttcttgtgggagtgaccctaagtgcctattgtttatgcttattcattgagaagtgtcttttaaagatcataacatggaccaaaatttgaagaagaattgccccacattgactgagaaaatgtcatgctaatgttagattttattctattttctcatatcatgatgtctgtggttacacgctcttgataagaatttgattccctctctttccttcatgaccagagacaatcccggcaaaaacatggagcaacattagctcttaccatttccagtcaagctcttcaacaatataatctgttctctgaatctcatttctcttatcaaaccttagcagcatatcaaaatcacctgggaattaaaaaaaaaaaggctgatatttggtttctaccttctgccaccctcagattctgatttgtttattctggagcgtgatctcggcattgggatttctaaaagccttctgagtgattctcatatataccccgagttgcaaaccatcgccctaggacctttattattcaaaattattcacatcacctccaagcttgttggaaattcaggggcctgcccctggatgtgaatctgcattttagcaagaccaatatgtagatatattaaaggttgcacagccctgtcctatgtgttggtccctccttgcaattaaatttagcttttagggatagggaaactcgcccatgtgaaaatcgttatttaattccttcagttccccagaggtgatcaaattatggcagatgctcactgtattgtttgagtaagtttaagaagtaaaagttctaactatggaactctgagcaactggaagttgaacaggatggagtttttgattagggaataattttgatcccttgaaattcctgcactcaggcaaatgacttcttagtcttcctatactgtgcctgtccttgccagggcccttggggtcaggagtacaagtcctatgagttccccagagcctggcctgccccaaagtttatgttttaggcaaaaaaaaaatgacagtatcatcataggttcaaattgaaaaacataagtaggccatgcgtgttggctcacgcctgtaccagcactttgggaggccagggtggatagattacctgggcccaggagtctgagacaagcctggacaacattgcaaaaccctgtctccactaaaaattttaaaaagcagccacgtgcctgtagtcccagctgcttgggaggctgaggagggaggatggattaagcccaggaggtagaggctgtagcagtgagctgtgatcgtgtcactgtattgcagcctgcgtgacagagatgaaaggaaaggaaaggaaagaaagaaagggaggaaggaaggaagagaggcaggaagggagggagggagagggagagaaggaaggaaaaataaaaataaaaacatgagtattcaagcaaagaacatgtattttaaagacttctcaactgactaaagtctcaaacaggaaaatacttaccataacagcaggctgaaatttcaagtaaaaactaaagggtaattttttttttagtgtgtattggaatgaatcagccaaaggtgggttcaaattaatgcctgtaaccttgataaattacttaccctaattttttgttttcttaaccaaaaagagcagggatgataatatctacagctggagttgttgagcattttaattaagatattatataagttttctagcctcagtttccccaaatggaaaatgaggataacaattctcacttcaggattgttatgggtatatgacaatgtatacaaagtgtttagcatgatcctggcacataggaaatgattacttaaggagagtgacttttctatatcactaatggcagaaagcatggtgagagtggtcataatacctggagcagtagtagtggtcatcaaatgttggtttccactcctttatcttataggggccaaatttggcagagagcttaagtaatctgtctatacttttattgaaatctactttgaaattccaccaggtttctcacccaatgggactgggtggggaaatgtccagatgtaagacattatcatctagtggtgtgtgtgtttgtgtgtctgtgtgtgtgtgtgtgtgtgacaaagagagagacagagagcacttgagtgtactctgttatattatacatgccacttcctaaagattctgatgtatggccaggcacggtggctcacgcctgtaatcccagcactttgggaggccgaggtgggcggatcacctgaggtcaggagtttgagaccagcctagccaacatggagaaaccccgtctctactaaaaatacaaaaattagctgggtgttgtggtgtaatcccacctgtaatcccagctactcgggaggctgaggcaggagaatcgcttgaaccagggaggcagaggttgcaatgagccgagattgcaccattgcactccagcctgggcaacaagagcaagactccctctcaaaaaataaaaataaaaaataaaaaaagatcctgatgtattgtcaacatccactctctccccaggaattaatacacagttaaaaactacctgccgtgcagaatataattgagtgctaataacattattgttgggcatacattcatttacataaatatgaggtatattattatctccattttacctgatgaggagactgtgaatgtgaaaggttatttgtccaagatcaccaaagtatctgtagctaaattaggatttgaactcagatttatcttcaaagcccaggcctggctcctatgtcttaatatactcgcatagaggtgatgtaacaggggggtggtagggagagatgaaaattacttttgcatcagactttaattctcacagattactccagaaaagcagatgtgagcacgctatactttgctctaaggaacagaggccacctagagttcctaactggacttttatgctttagacactatattacatctatcacttcattccatcatcacaaagtctgtaaatagggattattaacccattttagagaccaagaatataagattaaataatttgctcagggtcacacagctaataaatgacaagctaggagtgaagcccaggtctttttgactccataaatacatattaaactttcctagaatcattttctcatgctttgttttacagacaatctggaatatttgtaaaaggccaaaatatgttttctgtatcagaagattggctcagatattgtgtctgttagctttccttcaatgcccatttactctcctttttttattttttttttaaaaaaaagaggatttctgttttgttattgaacgtatagctgctacagggaaagaaatgaaaatattgattcagattttcttggggagtgaaggcagaggacattcagagtacaggatctgctcggttccctgggctgacaagctaaaactgtggataagaaaatgccagctgtctagaaatagtctttgaggcttgattttggacgttttgttaaaaacaacaacaacaacaaaactgctgaaaagaaagtcgtcaccggcatggataatagctataattcccaaacagaaatcatttctatagctattttaaaaatttgtcccagttgaaatgtaaatgtcacaggaaggagtcaaggttgttttgtaggatcccccacagcaaggatatagttttcctcataccttttttttttttttttttgagacagaatctcttgctctgtcgcccaagctggagtacagtggcacaatctcagctcactgcaacctctgcctcctgggttcaagcaattctcctgtctcagcctcccgagtagctgacattacaggcgcacaccatcacgcctggctaatttttatatttttagtagagacggggtttcaccatgttggccaggctggtctcgaactcctgacctcaaatgatctgcccaacctcagcctcccaaagggctgggattacaggtgtgagccaccgcgcccagccagtttccctcatatctttattccccaggcctcgtatactccctggcacataatgagtgtttagtcaacatgactgagtgaattaatgaatgcttgaataaatgaacaggtagtagagaatgaatatattggatatcgttatgaaagcaaattttcatagaaaaagagcataaagccataggaacccccgcagaagacacgaaaaacaaactcactccctgcttttgcccagagcaggcttacagctggcttcactttagtttatcctagatttctcttaggacattgaagacagaaaagatgtttgtaacctgaagtgtcagggaacaaagccagaaggtgcaacatgcagaagaaaacatattcaatgagtttctgaatgctatcctgtttttctcttcaaacagaaagaaaaactctctctctctcggccccccaccccctacactccccttctccctctctgtctttccagtcaaagagactgcagcggatggcatgccttaagtgcctgcatgtgccgatctgatccgcccaagctaagtggccaaataggatactccaggcaatacccccaagcccccctgcagctcagtgagaaagacgatgcaggaatacctgtgcctgcgtcgtgtgccgccactaggggtccccagcagcaggcgatgtgaactgggaattgggtagcagaggcggcctccctttgtctgcaccccaggtgtggactcctctttgttcagaggcagggccgctacctgcggcgtctgagctgcctgctcattaacccatcctgggccgtctgtgcacctcctgaggaaacagcgggtttctcagctcctgcccctagtgacgcctgcctcagaagagccaatgcgttctctttctcaggactaggtgtctttgtatttgaaataaggcttaaactacagagcgaaatatttctcactacagcaaaagagcattttgatgttgagaaattgatggcaaaaggaccactttcagggtacggtagagtacttgccataaaatatttaaagctagttgacgaatagccctgctattctcctgtgaatgcccaccactggattaatcttgaaagtaaggaatacagtatttcattctgtgtttagcacagggaaagggaatgaccttcactaaaaaacactccagaatgcctgcagtgagggagcacagctcctgctatgacagccacgttcaccctgcagtgctttcttgtctgcttttaaacttcaaaagaatggtgaaacaaaataaacaaattacaccaccataagagctaccctgcaaacaataaatcatgtgaattgtaacagccggtgaaggagggtggggtggggattgcaaatatttactccatcaagattttattcttatgtttcaccgtttcagtcttttttgatcacagcaaaggtagtatccttacatgaccgtcaagttctttcttttgctgcagatgtgttgttactcattgtcttgtagctcagtggtcacagctactaacgtggaaaggaactggcatacaagagaaccatttacagatgtccttaatttgctcatttactcaatgagtaaacaattgaacaacatccactgagcacctattgtatgcaaagtatggtagacaatacaggggctgggcaaacaaggatcctgcccccaccatgcttttttttttttccctgagacagggcctcactctgtctcccaggctggggtgcagtggcatcaacagagctcactgcatccttgaacttctggactcaagcaattctcccccctcagcctcccaagtagctaggactacaggttaactacaacgcctggctaatttattttttatgtttttagagatgaggcctcatgttgctcaggatggtctcaaactcctggcctcaagggatcctcccacctcaacttactgagtcactgggattataggcatgagccaccaggccaagcccgctattaatggactaaggtaatgaaatatataccaaaagtaccattaaaataagacagagcatgagatctgcccattgagaggtacagtagatggactagagaaatccaacagaagaagagttattttctgccttgggaatcagggaaaactttccagagaaggtgcattctggttgaacccttttggtatgtaggatgggaagcaggaaggaatggcagaatccagtgctgctagccccaagggcataggccaccatgaaagagggttgcctttgtgaaaggggggaacagagattagattggaaaggtaagtttggaaggctttgaatgccaggtgaaagctaagttaaaacaaaatgataatttttattcttaagaagcccacattatccacaagactccgtttatcccataagtcttttaatatttgaagaaaaaaggcagaaatgtcttttaaaattctactttccaaacaattaagatttctgtagcaccaatattctttccactggcaaataggtattacctagaattaaggcaacacataaatgaataaaatagatgataactttttcattgtttcatttggagaaatactttagaaggtccacaaacaggtccctgagcctaccaaagagggatgttagcattttatttccagcatgtcctgataacttactgatactaaacatttttgcaaggagcagccagccttcaggctcctgaatctaagaaggatgatagtgaatgattattcatgttgagttttctgcattggttatggctttatcaatccagatgatcaatcaactttcagattttagttctgaacctggagctttctgtttggtattcaaaataatgggtgtcaaagttatagctcatatcacaccgacagactgggcctcccccatcagcacttctctgttcagcaagcgtgtttgttggccttgtattcctcttctggccccaggatccaggaaaacatgagtctcagcttttttctacttctgtacagcacagggccttcaggtggtgccttcacagcaaatacccccgtcccttcatctgtcaatttaggacaataaaaataatctgcctcacagagccatgctttactttctccagttaaaacactatgaagggaaatatgagtatccgaactgcagaaacataatctgttgtccttttgtgaaatttcagagatgaataatgaaacctgttaccctattgcacaatttgggacaagaaatataagccatagattgaagataagacatttccccctagtagaacaggtcacagttgattagttatctccagatgcaatgaagaaagcaaaaatttttcaaactatacattccttccttaaagtgagcaacttacaatcactttggaacacaaacttcatgccaggtacactgtagctttccacatagcatcttatttaatcttcacagcatcctgtgttatcagatttttgtggcaggtgtagaaactgaggctcagtaggtctaagtaatttgctcaagttcgcagctaagtgacagaaccagagtttgaacccagttgtcttcgaagcccagatggtaaaattctaccgggcgacatagccaagtcagatagtccaccatctaaagatctggggggctacatagattactagtcaaacaagtaagtgctgttttctatcagaagaactctggggaaacagtaagttccttctgatctgatcaacaagccaagtgtgtgatgggtcacgtgtccctgaaggctccagattaggaactgcatcatttcgtgcagtccacaaaatgaaggatagtggtaggggctgggaaaatgcgggcgcttgggtctccttagaccagccagggctgtttcaaggtccatacagttgaggggtaggaagacgcagtcccacgtgactgaagagtgctcacactcctttaacagtttagcaaggtgtatttttaaaaaatggaccttaatgagaagacacactgggatagtatcctggagggatttttttttttaagttctaatcaactagaaaatgtgacgtgggtgcgtactgtgattatttaacattcattattcactgtatgttaggtccttggttgatgtggatccccagggcctagctgctgttctgtgtcactcctgataatttttaaattgactatgttcttttaaccatgttttaaaaagttgaactaccccaatgtgaacactttccatttttgctatataatgagagtactttcattcctttaatgtttgctttttcctttgatctaacaatttctcttcaaatttcacagttttctgttgctttaggattgaaagaaccgattagcccgctgggagcgtgaaacagacttaaaaaaaatctgcatggtatttcctcccagtgaaattaatttaggtttaaatacagggggaagggacacaccttgtgctcgagtctctttctctcacacacctgagcagttcctatcctgaaagggcacagtcggacctgctgccaagtcttaagtcttttgtgagaatctttttttgcaaggcacggagaacctctttctctttgacaccagctttgtgtgggcctgatgacacgtttggacggctctatttctttgaaggccaacctcagaggcccacggacgcgtcgggcactgtccgtggctgggttacttaagtgtagctgggttggcttcccgggtgttttaggaaacgcaccttcttgcagggcagggaccgtcagctccagagcaacaaaggacaatttggagaggagtggaaggagcgctccatagtggctctgtcatcccaggttcccttctgcctagcaccgtggccctagtgatcccgccttcgccctctggatcccccacccccactgtctcgctgctcgagagcccggcggggcgcggtgagccccaccaccttcccccacaccctccctccccatccccttcaaatcctaggagcagcgctgcgcgcagcagccgcgctcgccccgcgcccggccccggcctccccagcaccccggggacccggtcccccgtcccgcctccccctgtccagcagtccgcagcctccccctccagccccagtggcgggagctgtcaagcccgcagcagccgaaccaccccccgagcgaccgcgtctcctcttcttcctttgtgtgtgcgcgagcggagttggggcggagggagaagggggaggtcgctctgtctgtccgtctcccgccgcctctgcccggtctactcgaagtgcggcgggagaggcgggagcccaggagagggtgcgggagctggcggggcggctcggagctgccaggacgccctggtcccagccgcgcacaggggagcgtggacggcagaggggctcggcgggagccgagatccgcccgtcccggctgcccctcggcctccctctgctcccacctaccccctgacacccatagaaaagcgtgcaaaggcgcggagcgggacggaaaccacaaataaatagcggcggcggcagcgcgtcatctggtggagcaggaagtgcaggcagagtccggaggctggtgctttctgcgcgtccccaggactttgccatgggctgggggccgcggaggctgcgagcggccgggcgagggcagcggcggcggcgtccgcaccggggctgagcgagcagcgacgcgaggggcgcgcggagatggcagcgtccagcaactccagcctgtccggctcgtcggtgtcctccggtgagtttcagcccgtcgggcgctgctgccgcgccgggtctcgccccactgccctcgccccgcagcctgggatggacagagcctacctgtggccatcccgcccgctctctcggaatgggggcaggcgtccggggtgatacttgtttggttcgccagcacctcggtgcccagagcacctccgcgcctgacatctgacagcgcagaggtgggagagcggtggtgcccttagtgtgcggacgcgggtgttccggggcttggagtgcagcgagcgaaaagcgaaaggagcgggcaggctcgcactttctggcgcagctggagcgggggctggcggggcggagaaggttggggtgaagcagagcgccccgacctgtttgccgtgccgcgcccgctaccctggacacccaaatccggagcagaggggagcaaaccctcgctcctcgcagacttgattttctttgtttgtttcagaaattagctctatggagacactcgcttgggcatgggttttagacagcagcaatgaagggatgtatctttctgatcctgattgaagtgggttaggggaagagaggtcgagcccatcctctgactcttggcacatttacgagagagagagagagagagagagagagagagagagtgtgtgtgtgtgtgtgtgtgagagagagagagagagagactccttagagattttctgataatagtggctgtaatttcactagcaaggcatgcattttttttccttttaagaatggttgagcaaagggaaggcttctttcagcttttctatggttgatcatcgggtctaattgaagagaaaaaaattgctaatgaatctgaaggagtaggaatcaatagaggcagacccactggtttctgagtatgacaggtttctaatcagaatgatgcattaggtagaattcctgtacctctctggtcattgaaaactttaatgacaaacccaaagggatagctgataagacatttagggtagtatacagtatttaagggtcaagaaggtcatgaagtcctaatggaagtgcttcaatatattaatattgtattaagtcccattgggctgtttttattattattcgcgaattaaactcaaaggaagaaacacctttttggaggcattggatagcaagcagggcaaaaaggcaaccacagctttagatgtgtaactcactaaatcataaatgcaaggtgaatttgactaaggtgcaattgtgatgtggcacaaggtgatcacttgaaagccatctgttatctttcttggcagatttacttcctgggaaatggcacttcctttctcgatcactgccaactaattgaaaacacgttgttgttaggtgtgtgatatagttcaagtttctagtagtggcagccaatggggcagaagtcatatcttattaagagcagcaacaagttgaccgccgtggttttaattctgagaactcagcaaatgctacagtttatttttagtaccctcaaaccactgctgctgtttttcaattcattttggttgactaacattgaatttaaaatacagtggtgttggctttctattagcatatggttatccctctcagaaaactgcccactagaaaatgaactggtggggcaaaagaaaagacgaaaggagaaaggacaaggagctggtggtgtcacatgatttactggtggcatgaattacagctgctgtggcatctgaatttccagatcttgatgtagcttaagaaacctgattgaaaatcctaagtcagccttcggaagaatacgttggtttgaaacaacacagtatgagatttagatgatggtaattgctttcagataggttagagatgcccatgatagttctttttcctgctttatttacccctatttttaatcctaagggaaaatgggaaattatgtgaaaactgaaattcaaaaagtgggcatggatgtattgtttggcatgaatcagcctagcccatgagtttatactgcctaattccccaattaatcaggcactttgtcttgaaaaatacagcattgtagttctcttttaaagcacacttaccattgtgtggatcatgaataattcagatgacacaagcaattcacacctgtgagaggtgttgggcagaaagaatagagtctatttgtggtggcagctgggctctctcaggggaaggccagaatctgagaaattagggcactccgtcaatgtattaatcactattttcaagggcctactatgtgccaggcagtaagttataaacctcagcttcaagaaggctaagggggaaagataattgtaggattccctctagctctgaagttctgggagtattgtcttttaattctggcttcatcaccgaccagctgggtatcttggagtgagttacttaacttctccaagcctcaatttcctcttttgtaaatgaggctgatactgatgataagacctacttggtagagtgtcttggggattgaatgaaataatgtgtgtggagtatttagcacagggcctagcatttaataaatgcttaatgtgaataaattttacttctttgaggaatgaaaaagaaggcattcacgggctcagaatttaggtggagacatgaatccaacacacaatccacttctttcatcacacgttaaatttgatcttgaattttgggcttcattaaataagcacgcgagtgttttccaggtttcaggcatagccctgagtgtttggcatggaaagatgagtcaagatccttttcccttatcctccagcagccgagacaaacatgcaaacagcaacctctattccagtttgataaaacaaattctgtggagaagggtgcagaggagaggaattgacttagtcaaattagaggggtcagtggaaatgtcatatgagttgggccttgaaagctgagtagaatttttccggaaaacaaatggagaaaaagacatttcaggaagagagaagagcttaggtaaaggcctggagatgggtaagttcatggcattattttgactttctttcttgggaaagttatgcttacaggcccataagcagcatcatgcacagagctgccagctcactcattgctgctgctgatgtaggaggttttctttctgttcaggtagcagtgggtttgatggaacagctctggaagccgtaggacatttgggcaattgagcagtgaaaaaggaacagttaattctgtagcatccagcatagacagaggtgaagtcaacatgggttatacctctcatagaggaatagctgcgggagatttaggtatgtttgtgtttgcagagtaaagatctaataatttgctcagcattaaggtcaaagttgcctgattttcctgagaatttgctctcactagctgctgttaaactacatcgcccaaatgtgtcatttattctatggtaccaactgagacataacaaatgaaataatcaggttacaattaatttaaaaatacattttctgagaactcttcatgaattttcttctggaatattcaattatgtgtaaaagaaattgctttacctttgttttaataactactggtaattaaatttcacaatcacctagattggcaggaagctttgattacctttattattttaaattgcaaaaataaaaaaaagttcttatccttaagcttctaatttagcctgtggttcttggttatattctgagataaacaacggccaatttgcaaaatagtcttcttaataatcatgggttacatttgcttgtataattaaaataagaactttttgcatattagcaatatgattgccaaatggataatttcacagtcaagaaaaaaatcaacccaagcaaatcaataaataaagaagatatgagatgttctcagtaactgaaaagggtaaaacattaaatattaaaggaaccctggggataagaagttaagatttggaaacgtaaacccactgtattatcaaaataaagttgacacagacttttaaaattaaaatgcaaacagaaaaagataacaagtcagtattaggtgcagtcttcaaaaccttaattgggaaaagaacattcctgaatggattgaggtatttatttctttaaattctatacaacagtattgtgggccaggtaaatcatgctgttttctgctatcacactgatgttgatgtagaaatgataaataggaattttcattactcattattggggagtcaaaaccagtaacgtagataagtcttccatatttctagatgcaggtggcaaaactgaactatagtaattctggcaagacttatgtatgtctaactagaaattctctgcatccaatactacaaaacagggtatcttactgaaacagacattctcactgagaagttttcttttggacctttggatttttcagaaattttcttctggaatattcaattatgtctaaaaaattgctttgcgtttattttaatgataactgctcgataattaaatttcacatcacctagactggcagaaagacttgattgccttttttattttaaatcacacgtgcacaaattgtgatttaaaatataatctcaaataaaaaacttgcaaagctaaaattaaccctgtgagagaaattatttactcagatgaggagtactagtccttgttgtttttctcctgagcattccatacctcattttaacttattagattttattgtccattgtagcaactcagatgaactgagtgatacagagtctgagaggtaaggagatttttcttagcatgctacatatttgcagtgtttgacaagggggacccagtgatttgtgaacttgtgctgaaatgctggttctccccactgaccccatgaagtgcactgggtgaccctgtcatttgcccaacttttggggaatgtgaacaccaggtattttcaacggccagtctgtgcagggtttagctggacagtgtgttctgagagctgccacctggggcctggcctgagtgtcagccgtgctgagggccatctgctgctcggcagggtctcccatttttgcacaatggtggaagcaactggacatttggtttggagcacctatacatgagcagtgtcacataggaatgttttggaagagttttctgccagaagatcaagattcctgtcaaggcaaacacagagaaaaagacatgaacctagtgatagacagacatatgattaatagcatcccctatcacccaccaatcatttatcttttatgaatgtatgtattctcatttcatggcttctgaaatatgtcatttaattttcaaaacaaaatggctttttccccctccttccctctcttctttccttcctttctccattcttcccctccccctccctcttttcttccctccctaccttccctcctccctccctctatccaccttcttctccttccttccttctttccttccttccttctttccttccttccttccctcccttcgccccttcccccctccccccttcccccccccttttgtctctttttcttctctcatctgttgttggtcagatttctatttagagatgttttcatcaatcccacatttggttttctttactgttcgtagtttgcaaatcctctaggcaccttcctgcttttccttccctttggcccatggggaaggaagctggtattctgtctctcacatggattcaggttagggggtcaagatggatacctgtgtctctggtgcaggctggttggtgtgacagaacacaatgatgtgtctccaagctacaaacaaatgcagaggttcatttaaagtctccatggctagaggaaacggcagtcagagatgggccggccctataggtagggtgctctgcaatggaacctaggtggctgtcctctggggcctgaagctgaagaattgggatgagtgtatcatcaactggccactaacctttcagctgtgcattctgggagggccagccactagctgtttgtgcaaataccctgcctttctcctcatttataattaattgtacacctttgtgagactaatctgaatatagtctctatagtttggactaattttagcattcctttgcttcaacagtttggcctgtcaaaatcactcaacctcagcctgtttgtactgcagtgtaaagtattattttaaatcaaccagtagttttaatctcctaagaaataagagctggactgactagactgagagcaaggaggaaccttggtagttgtttcacagattccaacattgtataagaaaatcagagcccaaggaactcagaaactgtctcatgccactcagttacttgacagcagagctagagctggaactgtcatctaggacccaagctcctgtgacattaatgctccccccacccacttcctggctcatcctaaagagtagcatcatccttagagaatttcttgtagacttttttttttttctctctggcctcatagaggctgctctatttaattacttaatactttcaaaaaagaagtcataaagcgctttatattttaaatgggcctcagatctccaggctgttgtacccataaaggcacaaagatttaagtggcttaggtctgccctgtgtatagctgtgttgtccagtatggtaaccattagtcacatgtggctatttaaatttaagtgtaaaaatattcagttcctcagttaccctaggcatctttctagtgctcaatagcacacatggccagtggctaccatattggactacacagacacaaaacatttttatcattttttacaggaaattctctaagacagagacaaaactaatgtaaaatcaacaagctaaaaagagaaaatctgatccagagcgctcccattgctgtgtgtgctgcttgtgctgtttaggttatcttttactaattttgcaaattgactttttaaaaaagtaatttctttatgaccccgagggaaactgtggaatgacagctggaggatgatattggggagggtaattgaaaatgtttataaactctgtagtcctgaggtatgattcaagctttatttaaaaagtggtttgttgtttccctaatggcaactcaatttctttttcaaataaacccacagtgagttctgatttcaccctcaaagaggaaaaagtgcccatgttcaaaaagtttggatcttaccattgaatctcctttaaagacatcgtaaggaaaactgtgaatgtgtggactgaggttgctagtggcatatacaagccgtgttatttaaaagagattttctaccaacctggccatcagcagctagctagaaggatttttacttctacaaaaagcccacatcagggcaaagcaaatgcattggtttttagaaaataaagttagcttttggaattttcagcacatttaattggggggaaatgcatgcaaataagatgcaggaatatgacagtttctaagaaaaggaaacagttctccttgaacttctgttaccatcctcaagtgcaacaaaatgggaaggtggaaggtgtctttaaagtgtcaagttaactgtcaagaaagaggtgaatgttgaggccattggattcagaaactataataaccaaaagactgtgacatggtggcttattatttattgacataacttagatcattgatttagggcaatatgaatcacagaagcacttgggtgataaccttatgcaattcttttctcatcggaggcccagttcctggattttatcgggccccatcattgccctctgcaccctcagtactggctgggtattgtccttttcaaggaagtgaaacctagcgcttccttattacttcacataatgccatattagcaatgtgaaatgctttttcttacatgatgttgcttccatgaaataagcccaagagactgttgggacagcaaagaaatgggaagcagggagcgtggctgttgcagtagatctcctgcagcatgtgtcagaggctggggtgtgccattgacctctaagggcctgattctcaagacctagacctgcacagtccagtgtgacagccacatgtggttactgagccgttgaaacatggctagtctgaattgagatgtgctacaagtgtaaaattcacactagagttcaaacgcttagtacaaagccaaaaaatataaaatatctgactcataacctttgaaatattgaatatatgtttaggtgataatattttggatctaggcctggcacggtggctcacgcctgtaatcccagcactttgggaggccaaggcgggtggatcacctgaggtcaggagtttgagatcagcctgaccatcatggtgaaacctggtctctactaaaaatacaaaaagtagctgggcatggtggcgcatacctgtaatcccagctattcaggaggctgaggcacaagaatcgcttgaatccgggagaaagaggttgtagtgagcagagattgcgccattgcattccagcctgggcaacatgagtgaaactccgtctcaaaaaaaaaaaaaaaaaaaaaaaaaggatctattaagctaaatataatatatttacaaaattaattttacctgttttttaaaaatgtgtttaaggtaactactagaatatttgaagttacatgcgtggcttacattatatttgtattggacagctgtggtctggatgactccagtgagaatgttctaaccttgatcgcagaatctgccatacaaaacctgctgatgcactgctcagtggctcctgtagccctgtctacttatcctccattcaccaaggcagaaacttaccaaggcaactcagccctgattctcaggtccctgtttggttttagtcccagacattgagagatgtccttaatttttctgaatctttatagtgactttcaagtgaagttctataaagaggaacaggttgggacatttgtcacattcttgtttagacagattttgtgttttgttttgtttgggcttcagtttaattctagacttcatgtatttttgttagatttatgtatacgcctccttccaaagaaagcctgcaatgctatgaagttggaaagagaagctgaggaaacaaagcacacgtttttctctctctctgtgtgtgtgtgtgtgtgtgtgtgtgtgtgtgtgtgtgtgtgtgtgtgtagaaaactcttgcctcatagcctttgtaccgtgatgtcctgccatggataagtatgtgggtttacatacacatccacacatatctgtatttctgtatgtgtgtgtatatatgtatacacagaaagtggaagtggattaggttccaattatttccagtcaaatttatatcgtatataagttaatatcaagggaaatgaaaagtcagttctagcattacttttagtaatgaaataattcacttgggattatgctaatgatatgtagatattaatacacataatttggctgcctaatattgatttaagttgctcattcaaattctctttattacaaaaaaataaccattttgttttacagtgcttgtcctcagagacagtgagatccagtaaaccatacttatttggtaaataatactatttttgctgattttcatatacacagagagcactattctctttcagtaggtaccctttgagttgttaatttctggttggggtcctggttagctctagccaaatatcctctctggatctgcctcatgatcaatgcctagggttgaaggtactcccggtgaccagggcacagaagtttttgttctctgtgatgttaatatgccctagggttgaactttggtctcaggagagcccgagtcctatgcttgctttaagcagccaaactaatccacatgccttttttcggaatatgaattcttcagtggaaaaagcaattgacagaagctttgtaaactctcctgaaataattaatatcagattaagattagaaatagaatcacagcaaatcctaggcaattacacatgtaagacatgattttgagttaaacgatgtcatctgggttaagaacatagtaattgccacagtacttatttggttccgcattctaaagtaatagcagtaagggtattttgtaaaaatgcacaacagcctttcagggaggaaatgccctgcagacatcttacttttcataaatagctgagtgtaaatctgtcattcaggagttaatgtaaacatgtctgaatccatctgtagtttcagcttgtgctccttcttacaggaatgagtttcagccattttctacctatagagcgaattggtgtttcttcctattgctttaaatttaactctctgaaacttatttttagcatccatttttgggtttcatgaattaatgtgggttcattggaaccacacagtccaagggtggcgttgtgttataagctctaggaagctggggatctggtccaaacaccagcaccaaatagctctcagagtttctattttcttatccgtaaaatgggctaataatactagttgttagaatcgaatgtgtgaatggctgtgaaaaaacttgaaaatttgtgaacaaaacctaaaaatccctgatctcataaagctcatattctaataagatgcaccacaggttcctttcctgagtggtaagtgaccactcagaactcgtgatcttctaaggtaactggaaaagtttctcctaaataccttaccttgcttttcttcatcagcctttcaaatccttggagtgtaatcgtgccaacttagagtttctctactctatgtaaagctccaatatgcatcctgcagtcccaacattttaaattagctcagtcaatccaaggaacaccactgtttatactttcccatctagaggaatggttctttattatgtaaaaaaaaattatacacattttacgtaagatgcaatatatacaaaaaaaatcagtaatagcgtagccacataattattaggaaagccaccacccaatttaggaacattacctagccttgtgtcttcctctgtattcctctctctttccttccccatcatatttcattccctccttccaaaggtaaccactactctgaattttcaccttattcccttgcttttctttttaaaataattttatcatgtatcactaaaataccggcttcacaagggcagctatttttgttttgttcactgctggatctccagtgcctagcacagtgtctgacatatacaagcactcagttactgtcataggagtgcaactgtagccccttccctcctttatctcttgtttgtaaatcagttctgcaaggaccctgtcaccagttcacattagtcacaggccttcagtaacttttagaaaaaaatttttttcccccaagatggaaaaaactctatcgcccaggctggagtgcagtggcatgatcttagctcactgcaccctgcgcttcctgggttcaaggatttctcctgcctcagcctcctgagtagctgggattacaggtgcgtgccaccacacccagctaatttttgtatttttagtagagacaaggtttcaccatgttggccaggctggtctcaaactcctgacctcgtgatccacctgcatcggcctcccagagtgctgggattacaagtgtgagccaccgcgcctggcctagaaattttttttttaacttatttgcatgtacttgcaacaggagactctgagcagaatcacatgaatttatctgaatcaggactttttaccttgatttgtggttcacaagcacatttcaggagtgaatagtgaacactgaagaaacataagtagtaaagctagagttcaacatggagagccacagggagattctcaaaaagcgatgctgtatacatgctacaccagggatgagcctggaaaacagtatgttaagtgaaagaagtgaaagactgcatactatatgattccacgcatatggaacactcaagataggcaaatcctagagacagaaagtagatgagttgtcccctgcggctgagaggtttggagtgaaatggggagtgactgctaataggtatgagttctttttgtggtaacgaaattgttctaaatttgattgtggtaatacttaatagttacacatatctgtgaataaactaaaagtcattgaattgtttgcttttaaacaggtaaattgtagggtgtgcgatttatagctcaataaagccattactttaagaaagcatagaaattgatattgtaagaaagagaaggtgaatcagtcataacgtgagcaaacagaaaatacaaacccataggttaaggccttcctggacaggatgcttgcaatcagatgggaggcatttcaatccctactcactgataacttgctcaatacatgggggtgccccttctcttccccttttcatttccacattcatctttttctgcagccagcccctgaccttctcagatagttccatagagacttgctctctagggctggttagttcagcctccactagataaatgcctcccttccccagtatccccaaaaggccatggcaccctccttctcactgaagaatgagggagagcagtaggtcccctctgctaatgctggacaaagcaattagtgcatttcttatgactagttaattagctttttatccagctttttaaactctggccacaactctatggcctcgaagtagagtgtgagtcatccaggaagcaagtttctctactgtgtgcctgatgctcctgagtattattcgcacagtgatgtgtctgtggctgcctccatatgcccccacttagatggatgcttgtacagacgtttccaaggatatcatctgctggctcttttgttgtttctaatcaaagaaccgacaccctttgatcacaacagatcacggtattgtactacaaagactttgttagaaagacttaaattttacacgcttgtagctgtcacagaggttctgacagtatttacttttaccccacacaagtaaagaaaaaatgcatttgatcagatcacatggaaaatatgagtgattataaatagtaaattttctagaaccatgtattgttcactgtaaggaacctagtcaatgaacattttttaatacttgctggttttgagtgccaggttgttgcaaaagtcctcttcttcctcccaagtatagagactcctctaggtagataaactttctgttaattggaggaagattggccctgtcatggaattaatgaagctaaagacagacgtctttggggaactgagtccctgggtagccactttttgggcaggcttcagtatccaatggcctgcgtgaatgtataggatggctggctccccttcaagttgttcatggcctttcctcctttttcccataggacacctgagacaggcacccccacaaaatacaaataaatgccccttcacgggagtgtgaagacaaagcaagtactagaacttcttccttaaggtctcattcagagtgttttcctggcaacccctagaggaagtgggcacgggctacagtgactctgttgttctgtgtcttccctcaggtgaaatctggccaccctgggcaccctatgacagcagcacacgtggggatgatattgtgccttgcgctggcctctgcggttcccctgacatatcagattttagactttgctcctcctgctttctaatgtcacgggctaagccatctctaacaaaagactcactgttcctgggacctgctgttcactcaaacttttctcatgctaacaccaacacatataacacattcacacctcctcacatcctgaccagaccattccaggatgcaattattgtaaggattaggacgtttcaccgcaaatacagaaaactctaaaacaaagtgctgaggtaccgtggttgtagacactgcagtatctggctctgtctccttctcttagcgctgccctcttggtcggggggccttgtcctcagcctcactgtctttacagggtcaagatgacaatagcagtcccctgggatcatatctgaaacagagaaggggaaatctcttcctcctcaccctgtggaagataaaaaagactttctcagacacacctgccccacccccaccccccagcaaagttccccttgcctcattggctacagctttgtcatatgcttaggtgtgaaccaatcactggcaagggaataggattccctggatgtacttagtccagttgtgacccccttcctggagtgcagatggtccagcctctcctgaaggggtgaggaggcctgaacggaacagggttctgttaagggggaagagggaaccaagaacatccgccacaattatgtcatgaatgtcctcagcccttagagtctctaaggccaccaacaaaacactgagaattccaagacgcatggcctctcatagtcaaaaagcttattatagtcttagttgagagccaagcaattagtgcaactattcacttagtaataatatcactccctgaaaaaaatgttctgctaacctactacattaagatgactgacaactcatatgttgttttcacttgttagtgctttatggtttgaagcactttgttttatggttatgaaaaaaatataaatccattaatttaaaactggatagagtctttagctctaatgagaagtaggacagtgagggttgaaggttttgattcttgacaggctttaacatccctgcgcctgatgtaagttggaactatattattagaaaggcagggaataatagtagatgattcagcccactgccgcttgctatgggagggaatttttaaggctttcatttatgagaaatagtgatcattagcagttctttgtttttaaaacagagattcctacaaacggtcaagtccagtggaataaatgtattggtgcctaattggagaaataatttcaggttattcccaaggaaaagggaacaggcagagggttttggagagcagattcctgtttttcagttttgtgatgggccagggtgcgtaaagatcactggatgaggggtcacgtgacctaagtctatggtagttctttctcagcatttactttttgtgtgtccaggggcaaattatgttatcattttgtgactttgatgcttatgtgtagaattattagtttggcccagatcatctctgagggtcttaaaattttatgatttttctgatctgcctgtttcctcttgccaatttatggtgccttggtggtcccccaagggaacaaccctcttgtgtgtaaatcagttacactcacatatacacatatttcaaatagcaattaccagtggcatcatttgttccaggcacccagcctgtaagacatgaggactgttgggtgtctgtaccgtaattgcttttcagtcttcactcttagtaagcccagaggtagtccaagtatgctccaaggcggtatcatacaagccttttggaatgtgacctacactatgaaacccagcacgtacacacacaggcacacacacacaccccacacacacaccgtgcacacaccaatacttcattccatatgtacttattatttaccatgttccagattttagagatactgcaatgaacaaaacagacaaaaattctggaccttgtggaatttctaaatacagacagacaataaaccaaaggaactatatataatttgtatatataaatgtgtatcttatatatataattatatctaattattaatttatatggtatattagagggtgataagttctatggagaaaaataaagcaggaagggagacaggaaatgctgggggtaagggggtctgagtgttaagtttagtggtcagagaaggctttactgagaaggtgacacttgatggtgagggagccagccatgcagatatttggagaaagtacattccagacagaaggaaccgcagctgcagagtcccaatgcgagagtgtacctggtgtgttccaggaacagaaacaaggccagtagagtgagaaaggggtaaataggactggcagggaggaggaggcggatcatggagggcctcgtaggccgccctaaggactttggcttttacactgagataggttgtccctggagggttctagaagacagtggcatgatctgacttaggtgttttgtttttttttttgttgttgttgttgttgttgagacggagtctcgctctatcgcccaggctggagtgcagtggcgcgatctcggctcactgcaagctccgcctcccgggttcacgccattctcctgcctcagcctcctgaggagctgggactaaaggcgcctgccaccatgcccagctaattttttgtatttttttttttttagtagagatggggtttcaccatgttagccgggatggtctcgatctcctgacctcgtgatccgcctgcctcagcctcccaaagtgctgggattacaggcgtgagccaccgcgcccggccctgactgaggttttaacagatccattctggctattatgttgagattagactaaacacaaatgctgcatgttggcacacacacacacacacacacacacacacacacacacacacacagaaacagaagttccacaaagagagttcatcctgttatatatgatgtgctctgagactgtcttttctattgtatttctcttcatttatctaaaaactatcagggcccacaagttgatttcagaatccactctagagtggtgatgggcactttggaaaacagattagaaattggtccagaactccaaagatgtagcagattcagttagcctgctcaaggcatggttgcggtatacagaacaccctataggcccatagtactatttaatcataatgttcaaggagattttgttaatttttttaacttgctacactgcgtagcactattttattgaatgatcatttaaaagtttcgtctttccctacagtgggcttttattacaaatgtatattttaataactttttataaagaacatttcaaatatatttagagtaaagagaaaactataacgaacctcttaccatccaacttcaacaatgatcgcatcatagcctggtttcacttccactccatcccatacccaggattattttgaagcaaatcccaggcttggcatcatttcatctgtaaatatttcagatggtatctctaaaagatagggactcttttttaaaaaaagaatgctgggctggactgagctagttacctcctgctattgtggaggcaactcacttcatcccaacttcttgatacttttgcttctggaagtcatatttctctaacatcttccagaaaagtcttaaagctgccttaaccttttttccagtccacctcttaaattttttccccctcttcctcaatactaacatgagtgtggatctggcttgtctgcaaagcttgccttgcttcgaagcatccgactgtaaagaatcttaacctatggctgtgatttgtgggcctgaagaaaactatccatccttgcaaatgtcttctgctgagatgcctcacacggagactgtctctcctcttcttcctccatggatctgcttattcaggacagccctgattcttccaccagtcccaaaggcaaacaacccattgctgcagagaataatgccccaaaaaagggagacgaggtcccagtcaagaaacagaagaccagaactgtgttttcttccacccagctgtgtgtactcaatgatagatttcagagacagaaataccttagcctccagcagatgcaagaactctccaatatctggaacctcagctacaaacaggtgaagacctggttctagaaccagagaatgaaatctaagaggtggcagaaaaacaactggccgaagaatagcaatggtgtgactcggaaggcctcagcacctacctaccccagccactactcttcctaccaccagggatgactggtgacctgactgggaaccttccaatgtggagcaaccagacctggaacaattcatcctggagcaaccagacccagaacatctagtgctggagcaaccactcctggaacactcagacctggtgcacccagtcctggaacaatcaggcctggaacagtcccttctataactgtggagaggaatctctgcagtcctgcatgcagttccagccaaattcaccttccagtgacttggaggctgccttggaagctgcaggggaaggccttaatgtaataagcaaatgactaggtattttagtactccacaaaccatggatttattcctaaactactccacgaacacgcaacctgaagatgtgtgaagatgagtgaaattgatattactcagtttcactctgggtagtggctgaatccttcctctcccctcctcccctccctgataggatttttcttgtatggaaaccatgtgttctggcttccattatgcctatccagtcaatttgatggaggatacagtatggttggagcctaatcagagaggtttctttctttttttcctattggatcttccggagaaaagacgttttaataaccttggctactaaggacaacatgatagaagctgtctctggctatagataagtagatctaatactagtttgaatatcttcagggtttagaatctaacctcaagaataagaaatacaagtacaaatttgtgtgatgaaggcatattcctattttttgggattgggaggctttacttattttttaaaaactattgaggtaaagggttaagctgtaatatacttcattgatttcctcaccttttttggttctgttttactatatcccctaattttttggtgatgctaatctttgtagaaggaggtcttgtatttactgcatcatgatgacattagtactcctttagttggtttaagtacaaatgaatgaaacaactatttttcctttagttgattttaccctgatttcacctagtgtttcaatgagtaaaaatacagcttaaacattaaaaaaaagaatactgcattactgtaatctttgtgcatacattcacacaagcaataattgcgctttttagtctgatcagcagtgtctttattcattagtctcagaagggaaacacaagtgaccttaatgaaatgaagccgtggtcatgctttctccttcctgattccaaagatggtgtttctggatgctgctaaagccccctggtaaataaatactttctcatctccagaaatgagtcaattcgatccgatttccctttttagacttccatttatgctcaaatatggcctctttttctgtggctcttgagtaattatcagtaaacacctagagtaaggccctaggtcttagtcatcacggtaccaccccagtgacttagcatggttactggcacccagcagcatccctcacattttgttaatgttttacctcttttcctatgcaggagctggagtaccctctccctagtcctctggcccgtcattcccttttatccatatgttataacctcattaaagtctgacttttctaggaaacctcgtttctaccaggatggatgcctttgtggatcagtattgacgctttgacaggaggcttcaagttaatctcaactcttacagaattccttctattccatgaatttattatcctcagtcaatactgtaatgctcatcttcttgtggtgtctttcctaatcttcaccaacagtttattggccagaaactaattgataggggctacgttactgaaaacttcgtcatttctgaagatgattaatagtcctaatttcaggcggaggtagggacatatttttacacttgaatatatgttatgtaagaatccaccattgaatgcctcttacttaatcacccaaatattttatctatgaaacttggcagggagatggcaatatcctgaaccttatttttctcattgtttctctttcctctttctcatctctctttcataaaacgtgagtgcagagtggatgccagccaccatgcttggctttgaggacataaatagatacgtagcagtccatttgtaactctttattcggtctgttctcagtggactgtcactccaggaagggaggggcccttgggtcaccagctactagcagagacactgccacaccagaacttcttggaaacttttttttggatgaatgactgagtaaatggagacatgaacttcactgtaaaggagttcacagtccaaagtttgagagtgaatctggactctgtgaaactctgcagaacttgtgaagtcattaacaattaaatattttagttcaaactcttcccttaaattattacccagtctgagatttttgtgccgtttcatagatgccagcagaagttctgcacggggagtcttacagtggcacaggtacagcccttagacagaaaagaagcctgaggccgtcctctgcattcactgtccatttttcccagagtatgtggtcctagctacttgaggcactcccaacttctcattctttcgacttctgtaaatgtcacagtcttgggaggcctcccagaggtcccaattaagggtcttatttagcctggagccagaactgtagttgtaactccttaatgccaggaaagcattttttaaaatcagcacactcacctaagtctgtttcctaaggtgttttcttctatctgagttacaattttatgttctgtgccaggaatcatttacttctggttcaataggaattaaaagtacttgttgctatgtcattccagggcaaggatttgcttctgcttggaagttaggtctttagtgtgtgagtatatgtgagtgtatgtgtatgtcattgtgggatgttgcacataagtgtatgtctgtgtaataaggcagattcaatttctcagggaaagaaaatgttccaaggaccataacctatgggacaaagcgttagctactatcttttcttttggctttaaattatgcactcttcttccttaagtgactgattctgaatatgaacgcgttcttttaaagagtggaaatgatatcatttaacatttaaatattaaatcttattatgtaagccaatttcttaaaatccccaggtggagtttgtaactacgcctaagtaattctccaggtgtaatgactggcaagctgtcgagtagaaatggcagagaagcagctattgttgggagaggctggaacttctttgtttttagtatacattttagttgctgaaagagtccttgtagattttcctcaaaattaaaaaagccagaggaagaggaaattacaattaatagcctggaaattccaattaatctctcaaatagtgattaatttccagagacatggagactctgcagtatatctgggaggaaggaaaagacaattagggttggggaaattggtagaggcgcttgggtaggtggaaatcccaccaggattgaagactgcactaggattgagataattgacaaggttggaagcttgccaaaaactgtatcaagtgctgtctcttcctaatgggcaagtgtgcccattttgaaacccactggccatatttcctaaaactgtctattatcactttgtggaaatgttcaaataagatctgttatcaaattacatttctttctttgtcactttttagcttatcattccgccaaggttttggcccctgcccttcttcctgcttcttgcctccttgaggctgagctcttctctctccccagcctctcagtgagctggttcaggtctgtgttggtttcagataacggatgctttaaatttaaggtagtggaaaccgctgatctagcctggaaatcacaaggaccaattgatttatcaatttttcttctataaaggtaaaataataccatggcaattttttagtgcagattattgaggctcagatgaatcagaacgaaggggaaattaaccggctatacttatgaaatgcgaatgctatgtttgcattgttggatggattcagtcttaagcagtttggaacttatttgtatgtacctgaggttttaactacatggtaatgaagatggtgttaagcttttacaggagcacggcttttgatctgctctttctccccagtgtactaacagtacttattaggaggaaaaacctccagagagtcagaataaatatcatagtcctttgaacatctaaatatatgcagcattttacagaaataatgtaagcgaactaaccgtttgtggtcagctggaaaacttaactttcagagggatttgaccagctatactgacctagaaaatgaaataagcagtttggaaaatctggtttgtgcatataattatttttatattatctcaggctgtgccttgcaatgagtaaaccacggtagttatctgacctattgctctaccactgccattgcttcaacacagtaattatgtaagactcagcatgtttttaactaactaaatgcatgcaggacattccttagcttcagcagcctatctggagactactcaagggctctttatcagtctttcagtttgaatggaaaagagactgtaaaatcatgacctgcgttaaaatgtgtagactgggagggccattgtggaaatatttaatacaagcacttggcacttttgttagctgaaaatgccctgaaagtttatgacgtatcaaatatttctaattaaaatagaaaattaatcttcatgatgaaagaatcctaacagcgctttttatatgaatacaaatatttagttgggatataggttatagaatgtctttaaggccctgaagtcctttggatttactgtttttcattctagttcttcctttaatagctcggagcaaataaaagtgatttcctttagaatgtgcacatgctcctaaggatatctgaataaaagatacgtatctgataatttgccatctcagcatcatcccttgggcagcaggttggaaggcaatagtttaatctgaatgtgaactaatgcttatgcgcaaagacatgtatgtctcttcctggatttgaaggaactgagagtagagcagtttaaccaggattccctagatggcttatcatcctgatgagctagcattgcaatcagaagacattcacttttgcttaaaacatgaaattgactggtagagttcagatattaataaaactagttttagcctgtagttttaacccttttcatcttacatttaagaaaaaaaagacacttaaaaggaaacaatgaattggaactaattacaaagctctaaagggccctgggtgatgttagtctcattagggattgtgatgtcccctcccacccatctcccacccccttccaccccctcactcgccagcatgactctctttccttcttacctgtaaccataaataccagacagccaaagtcatgcctcgtgaaggtaggcatgtggagtggtggaatcatacaatatctgtgttaaaaggttatatcctagtaagataagcgtttggactgtaaactagttcaatcattgtggaagtcagtgtggcgattcctcagggatctagaactggaaataccatttgacccagccatcccattactgggtatatacccaaaagattataaatcatgctgctataaagacacatgcacacgtatgtttatagcggcactattcacaatagcaaagacttggaaccaacgtaaatgtccaacaacgatagactggattaagaaaatgtggcatatatacaccatggaatactatgcagccataaaaaatgatgagctcatgtcctttgtagggacatggatgaaactggaaaccatcattctcagcaaactatcacaaggacaaaaaaccaaacaccgcatgttctcactcataggtgggaattgaacaatgagaacacatggacacaggaaggggaacatcacacaccagggactgttgtggggtggggggagaggagagggatagcattaggagatatacctaatgctaaatgacgagttaatgggtgcagcacaccagcatggcacatgtatacatatgtaacaaacctgcatgttgtgcacatgtaccctagaacttaaagtataataataatataatttaaaaaaaaatagaaggaaaaaaaaagttaggttctaatacagacaagaagtttaggctgttttaaatgtgggcaggctctgtcggagactgatgcagtgcgtattataaatcctgaatcacgaggaatgggttttgaaaccgcagtggcccaggccacattcagacctgaaaaagtcgactctcctagagccaaggccaaattatactcatgtgtagtcaaggtaatgaaagaaacactcaccgtttcccaccactgtgtaggaagctgcttagaaacgtttttaggaaaggttaaaattactaatttaaagaggactgaaataagtcaaaggtgtattttacaatctttagggtaatcattaaaataataatataagaagctcaattaaaatgctaataagggagaaaaaatatttttaaaaacacttgaatgactaaaaagaaagtgaaaagaagaaatacaggaacaaagaataggtgtgataaatggaaaacaaattaagatggtaggcttataagaaactatatcagtaaatgtatcaaatataagtggtttcaacattcctattaaaagattgccagactggatacagataaccaattgtagtaagtttaaatctagtaggttttaagatactttactaagtttaaaatttaagatatactatgtagactgagaaagattgaaagtaaaatgttagaaatatatataccatgcataaattaactaaaagctataaccatattaatatcaggcaaagtagactttaatgcaaaaattatcatgagagataaagagggatatttgttaatgataaaaggaagttggctgggcgccgtggctcatgcctgtaatcccagcactttaggaggcgaggtgggcggatcaccacgtcaggagatggagaccatcctggctaacacagtgaaaccctgtctctactaaaaatacaaaaaattagctgggcgtggtggcacacgcctatagtcccagctactcgggaggctgaggcaggagaatcacttgaacccaggaggcggaggttgcagtgagctgagattgcgccattgcacctcagcctgggtgacagagcaagactctgtctcaaaaaaataaaaaaatttaaaaaaaaaggaaaagttgaaaataaatgattcaaacctccaactccagaatctagaaaataatcagcaaattaaacccaaagatggtaattgcttgaaccggggaggcagaggttgcagtgagccaagatcatgccactgtactccagcctgggccacagagggagaccctgtcttaaaaaaaaaaaagagagagagagagagagagaaagccaaaataagcagtaattatagaagtaggaaacgatatataatatttgaaaattaacaaaaacaactggggctttttttgacaagattaatataattgatacatctctagcaaaccaatcaaggaaaaaagaagagaaaatacaatgaatttcagaaaaaaacaaggggatcaccactatatgtcatagagatcaaaaagataagatactatgatcaattttatgtcaataaatttgacaacttagagaaaatcaacaactttctttaaaaacacaacttaccaaaacagacataagaagaaatttaaaatctgaaaaatcctaaatttattatttaaattgaagcgacaattaaatgccttcccctaaatttaatttcagaccaatattgctttagcaataaattcttccaaatgtttatggaagaaataatgccagtgttacacaaactcttatagaaaatagaaaaagataaaacatttcttaaatcatgtgtgaaatcagcctaacctaagtctgacaagaacttactagtaaagaaaaccaccacccagtatctttcatgaatcttaaaatatttgattagcaaatcaagttcagggatatgtaaaagaatatgtcatgatcagatgggatttattccaggaatccatggttgatttaacatttaaaaaccaatcaaagcctcgttaaaagaatcaaagaggaaaattatgtaattatttcagtagagaagactaatttgattccgcacttggttataataaaaattctcaacaaactaatagaagggaatttctttgatgttatataactgcatacttaatgataaagtaataaatgatttctccgagtttgggaacaagaaaagatcaccaattggcaattctagccaatgcaataagccaagaaaaaattgtcatgaaggttgagaagaacgaagtaaactgttttccacaaatgatgtaattatatacatagaaaatataaaattattgaaaataatgtgactttaacaagaatgctggatgcaaggtcagtgtaaaaaaaatcaagtctctttatactagcaataaataattcaaaaatgaaattttaaaccataatttatagtaacgttaaaaaatcaagtacctagtagtaaatctttttttttccttcaacttttgttttaagttccgggatgtatgtgtaggatgtgcaggtttgttacataggtaaacatgtgccatggtggtttgctacacagatcaacccaccacctaggtattaagcccagtattcattagctgttcttcctgatgctctcccttcctcgacccccaacagaccccagtgtgttgttccccacatatggcaatgtgttctcattgttcagctcctatttaaaagtgagaacatgggatgtttggttttctgttcctgcattcgtttgctgaggaaaacagcttccagctccattcatgtccctgcagaggacatgatctcattcctttttatggctgcatagtattccatggtgtatacatactacattttctttatccagtctatcattgatgggcatttgggttgattccatgtctttgctgttgtgaatagtgctgcagtgaacatacgcatgcatgtatctttatcatagaatgatttatattcttttggacatatacccagtaatggaattgctgggtcaaatggtatttctgcttctagatctttaaaatcaatgtgcaaaaattgcttgcatttctatacacaaataacaggcaaacagagagccaaatcaggaaggatctcccattcacaattgctacaaaaagaataaaatacctaggaatacagctaacaagggaagtgaaggacctcttcaaggagaactacaaaccactgctcaaggaaatcagagaggacacaaacaaatggaaaaagattacatgctcatggatagcaagaatcaatatcgtgaaaatgaccatactgcccaaagtaatttatagattcaatgctattcccattaagctaccattgactttcttcacagaattagaaaaaatatttaaaaattaatatggagcccaaaaaagagcctgaatagccaagacaatcctaagcaaaaagaacaaagtgggaggcatcatgctacctgacttcaaactatactacaaggctacagtaaccaaaacagcacagacacacagagcaatggaatggaatagagaactcagaaataagaaacagtaaatccaatgagagatgttcaaaaccttcaccgtgaaaactgcaaaatatattgagaaaaactgaagattatttaaataaatggagtgatataatcatgtgcctggattagaggattgtaaagatagtttcccctaatttgattaatagattcaatgcaatcccaataaaaatcagttaatttttgtgaaaattatcaggctggttcaaaaatttaagtggaaatacaaaacaccaagaataactgaagcaatactaactaaagaagaaaaaacatggagaacttatgttgttagatattgacttattataaagctgcaataattaagatagtatgatattggctcaaggatacatgaatagagcaaaggaatagaatagagttcagcagtaatggttacagatatatgcatatctgacaaagtacttgtatccagaatatatcaagaatcttacacagcagttggaaaagtacactcaacccaattaaaatttgggcaaaatacttgaaaaagctttcagagaagagaatatcacagtttactgtaaacataaaaagatgctcaacactattagtcatgagagaaatgcaaataaaaataacaatgatatatcaccacccacccaccagaattgctaacatgtaaaagactgacaatgtcaagctattatcacagatttttggtgacttggagaaaataattcactctgtccactctgtccttatggttcaaaccctatatgatcaggtcttcttccaatttttggcagtggcatcccaaacccctctcatttagtcttgccttgtgtccacagccttctcataccatccaggtagatgtagctaatatactcaggtcttccaatgaaacactaattatcaccactccccatatcaatcactatgctgacttcatagctgtaaattaattttgcctgtttttgaattttatatgcatggaatcatataagatttacttatgtacactttcatatttgggttattttactcaacatccatatgttgagatttatctatatattatgtctacctgtggttcattcttttttattgctgtaggggattccaatttctataaatttaattgtatacacttagtaattctgtgattgatagactcttgggttgcttccaagttgggattattacaaaaaatattgctatgaatattcttatatatgcacatatgcacagatttctgttatatacacatggaattgctaggtcatgaggtacatataatatattcagctttacacaatactgctcagcaggtttctaaagtgctttcactagtttgcccttccaccagcagtgaacaaaaattttagttgcgatgtattgacaccatacccatgcaccatttcttattgacttaaaactcttaaaattcttttgacttggctctctaaaaccctataggcagtaaaattcaaatcttttctatttcaagaacaggaagactttcatcaagggaaaggtgggccagactgttgaaaacactgcaggagtagcagcagcaaatgaacatggcgggaaggactgtcacagctgatgttctaaaattggaacattctaagggctacttctgaaacacgaacaattaggtgggattgctgtccaaattaagaagcccttacttcttaatcattaatatagttcctttttcctccagaaatgttccaattatgaaaaattatgaaacagtttgtgattaagtgatactctgtgtaaacacagtaaatataactgaaaaggatagacttttaggccatggtcagatactgttaaattttagttaagttatattcataactaagtaacattaagttatagtgagaaggaacttcacagtacaaacatttttttctatgtgtgttgaatgctccgagcttatttctaaatcctgcttggtttaaggaaagattacaggagagaaattcagaagctaaaggttcaggagccatttctgccattactaactgtgtgaccctagtcacttaatatctttgtctcagttttaaatatctgcagaaattatggaatgttatatcttctctgtttaccaaagagattattgtgaggaacaattgaaatggcctataacagctaatccatatggggataaagttaaagaattctccaccatgttttcatttctatatttaaaataatcttatagttgctaaagtgctattcaaacatgttatattttttcatatgttaaatcacaagataatcttatttgttatatgccttatgccataaacagagcccagcatagtgctgtctgtatttttctcattgttctttaccttagtagaaaggaatggagagaatgattcataatgagtaaaacacatatcatctccggagagagaaaataaggataaaggcagatttccattcaggagaatttatctgggctttggaagtaatttaaaatgactgttccctgtgttggcaatttgtagcctgcctgagttgacacctccattttcaatcacagcaagattgcttttagttgcaggcaattgctaaagccagagatctgaaaaggagcccttttcaaactccttatagatttaaaacagatagaatatgaatgtaattttttctcctgattgtcatcaaatacttcacgaataatttaaattaatccataatttgtctaaatcaagaggaggaaagcatggcctaatcataacattgttgtgttgtacctggacatagagaattagcctggaaagatttgttgctaccaaatctgcaaactttattatagagtagttgtttgggctcatatatatgtacggactctaaaagaaacaatagcaaacaatatcatatacagtgatgaagttcccagatcagcccaccaaaaccaatatatgaaaaactgtgtgcaaatgtgtgtgcctgagtgccttctgactatccatttcaacagagatgtgtatatgcatgtttagagcattatctccaaatatttgttttgcaaaactgagtttgattgtataggacattagtgctgtagtttagcatcgctcttcgtttcctatcctggttttacaggatatggaaaacctaatccagaagtagagcaaagctgataatccttgctaccttatgaaggtgcaaggagactggagctaatcacctgctgtgagcactttgagacccttttttgaggaatcaccactaatcacactggaaaagatgccttgcctcacgttgaggggacagttactattgaaagggtgttagtcactgagcattactgtagttaaaacattattctgagacatgtcctacaaggcatgggattaggcgtttattaataaaactccccaaatggtatttgcaatgtgtcattctacttgagaacataaataggatagaattaaactaacacagaaagattacttatcttataattaagaacattgtacaagaatgaattttgaatttataacaatttctgggctggcaagggagacgtattaaataacctttcttcttaaaaaatatcttttgagacataaattctctgtggggaaaaaacacagaacaatgagctgtcttttctcaattgattgcctgtagtgttacaaatactttgaaaaatgaagggaaatttaacattttaaaatgatctttcagaaatctattattatgagcggggaaaaatgaacaaaagtccttaagtatttaggctttttgaaaacttccattatgtaaactaggtaatactggggatagccaagcccacagagtacagcagcatgaaacacaaacaagagtcactgattttttatagtcagctgaaaaacagcacatctaattttttttaaatagaaaaataaacaatatttcctgccatgaagacagttactgtcttagttccatcttggaaacgtcacagagctttatcctatttattttcagtgcacagtaaccaccagcatcagtttgagtctgtgtattttaagagcatggctaaaatgtcatatgctgttacatatatagcaacgtagggagtggaacactcactcaatataaaaaaatcaaaatcaaaatccatttatacaatcagagtcaaatttatatcaatttgcctatgctatgacttttcgaatttcctctggaattatcctggtgatcctaattttgctcttaatgtcttccatgtatgccccaaataattaacataacgaagataattttattgtaaggttttttgataacttatttttgtctttgttttcccctgaaatgagtgtccttcacctagtccttaagtgtcctatctacaaaatggagaatgaaaaaggctgccaacactgtaacataggtaggaggcattcgtgttttcagaatggagttgtaatgaatacacacacacagttcctgtcactgctgtgcacatgagggtgtcataaatggtccctgacctcaagacattagacctatggcaatatgggacatgatgctgtcattttgttagactattctaggcctattctacttcagtgtctagtgtagcattactgcagaccatgtgtttcagcagagtttgtggatcttgttttcccaatagctcccactgtaatagtggtgcaccccgctggcagcaggcagcttattgagaagatgtctccatgccttgctgggcactgcagcctacattaaactatccagattccattttcatatttttctgacttagagtcactttcccaactcagtgatctcctttctggcagcagcatcctgtacatcattaaattgttccttgttctagagggatggacgtactgagttcctgttaaaggtttgtctgctgtctagaactactccttctcatggtaaaagcccctaattttcttatggtgcccactttatcgtaagtccatataggtctgcagcttcctgaggtggctcatgaccagcttcgcccagaacctcagggattgggccagaaagggaagatgacctcattggaattattggccattgctctagcttttgcttgctggatttgaactgtagtcattttgctgtcacctgcctgggacccgagatagaccacacacctgtggaggcagagctgagagatggagaactgaattctgattttcctttttggaacctgaatccagtagtggttgaagttctattcctgaccttttgacttcctcagcacttttccctcccctctttagcttaagccaattggaattggtgcttctgtcatctgtcacttggaatagaaacaacccaagtgatacacaccaagtatctgtagtccaagttcaaaagaatttcactctttcattgttttagcctgggtttcccattaataaatcaagattgaaaaatcttccttcattcatggatgctggcatccaacaagcttattgttaagttaaaggcttcagattgtatgacaaattctcagccctatatattttctgagttctaaacatgatatcaagttaccttaaaatccagatatctacaagtcattgcttctaattaacatagaagctaccttaaaaaaaaacctgtacacacactaatatatatatatatacacacacacacacacacgtgtgtgtgtgtgtttgtgtgtttgtggagagagagagagacagagagagagtcatgtgccacaccatgatgtttccgtcatcgacagactgcatataccacagtggttccgtaagattataatgcagtatttttagtatacctttcccacgtttagatacacaaatactttccattgtgctgtaattgcctacagtattcagtatagtaccatgctgtacaggtttgtagcctaggagcaataggctccagcatacgctgtctaggtttgtgtaagcacacgctatgatgttcgcacaacatgaactcccctcacaatgaatttttcagaacataccctgtgagttaagccacaaatgactgtatacatatacacatatttctatgtgaatgtgtaacatgaatacgcatcataaacatatatgtgtgtgtattacatctttaaaatgactagaccagcaatatgtgattcctttcactcgttagacaaaacaaataaacaaaacacaaaacctcattgggcaatattgggaaataaatacatcaagggcagagaatttgatgtgatcaaagtccaaggtgctttggctgcaggcacagtagtaaggggggctgtttgtctcctttgaccccaaggtttcaagtaggccaatccacccacatgccctggggcagggtgccaaaaaaatgggcctctggcgctgcaccgccctccttcctgagctctgctttcacgcccattcttccttttgctcccgctctgctccagtcgggcctgatttctgagcagagtgacatgctctcctttctggtccatggattcagggatggactcgattgccagctttcaccctgaaagctctctggagtggtttgcccagctgtggccccctcacctggactgaccagctcctccccgctgttgacctccttcttgcaagaagggtgttgtttcaatgtgctttgcaagagtggggtggggtgaggaacaaggatgagataaaagagtgacaaaagagtagcagctagaaaaaggacaaaggtagtgtctacccacacatgtctttaccttatctaaaaatacttcccattggcaggcaggatgaagaagctgagcagatggcatatgcttcctagtgcaccagattgtaatattatacacttggattacaaagtctggatatcacagctataaacatatgtaaacatttttatgttttgctaaaaaggaaaaaaaaatcactgatgatgtattatcctaatgagctgattacgaagatttactaattatattcccaagatctagatagaaagaatggcactggctccagtgacataccgttcagattcagtagtatactggtatttttcattttcgtttggtttatcaccatttgctacagctgtgttttgcagattagaatcctaggactggaaagaacctttagatgaagaattggaaaacgaaggcctaccagccaaatccagcctgacaccttttgttgtaaataaagtttcactggggctgggcgtggtggctcatgcctgtaatattaactcttctagagggcgggaagattgtttgagcccagaggttcaagaccagcctgggcaacatggggagaccccatctctacaaaagtacaaaaattaggtgggcatggtggcatgtgcctgtagtatcagctacttgggaagctgaggtaggtggattgctcaagtccaggaggtcaaggctgcagtgagctgagatcacaccactgcactccagcctgggagacagagggagaccctgtctcaaaaataaataaataaataaataaataagttttattggaatccagccatgcccatttgtttaggtattgtcgatggctgctttcccactaccctagcagagatgaatacttgtgatagtgactgtgtggcctggaaagtgtaaagtattcactgtctggccctttagagaaaaaattgccaaatttgctttagaaggctatctaagatcatttggctgttttctggaatgcttgtattttgttgcctcagaaaagtgtttgcctagttaagatttctagggacgcacatggtattgtcttactaaacaaaaattcgttgtaaaaataacttacctaaatcttttataaaatagtgtaaacccaattcctctttcttttttttgagacagagtctcgctctgtcttctaggctggagtgcagtggcgtgatctcagctcactgcagcctgtgcctcccgggctcaagtgattctcatgcctcagcctcccgagtagctgggactacaggcatgtgccaccacgcctggctaaattttgtacttttagtagagacggagtttcaccatgttggccaggctggtctcgaactcttgtccttaagtgatctgcctgcttcagcctctcaaagtgctgggattacaggcgtgagccaccatgccaggcctcctctttcttaaaaataaaaacaaatctttaattcaattgtttttatttcagctgctcaatgaaagatttttacatatttaaagatgatcaaatgatctgatttttctttttttctccaccaaatatccatccctgtttaacattcccaaatcttgaaattttttttgtgtcttatctacaaaacctttttcatttcctgtagtgacaattctttatttactcaggtctacacattgtactctaatatttacctattataaagtgcatccaggtgtataatcagtttgcatcttaaaataccttatggtgccagcaagcatttgtattaggcccgttttgcagatgtggtacagcaaggtttcttgtctggtctgtgatcacacagccaggaattcataaaccttttttccagcataccagactgcattgtgatgagcctggcgggaggacacgaaacagttccaataagctatatggcatgtgtctgacccagtactgtgcttgctttggggaaaaatattctgtacatcactgtgtatctgctggcttactttcggctcaaagttgcacaaggagccagtgtgaccttggtacttggtccactgtttaaatactgccacggtactctgcagccacagcaaacaggttatgtgttagcagaagaactgggagagtgcggtgaaatgagcaaaaattcatccccggtaggagaaaaggtgtgtgtttcggaggaggaggatgttcaatggcatcatttttgtataaaaggacagtcttatctacgtatctgtctttaccgcattacgcataggcagcccatccccaccttgtgtgctgtgccatttatttcccctcatctgatgctctgagctattaagcaacagcaacaaagagatatctccttaatggtaacatattgtcctcagcaaagcccaaagattgcataggggcactgctgtggaaatatgaaaaaaaagttagtactgcacttttgggggtggatgttttccaacttatttattttagccttttagatgtttcttttgggaccaaattatagctctgatactatcattagcactttaaattattggttacagtgtataagggaaatacaagctgcttcttgaacattccgcatttttagttaaacagggtgtttccttttttggttgtatgttgcttgttgttcatccttatcatcacatgtgatcatggttcctatctgaacagatcatcttactaattgagtgtctgcagattgttgcagtttaagtatttatttttatttctaataatattacagaactggtcaatcacttgaagggtaaaccgcttttccttacacaaacagcaacaacttttccctccagtgtctttgtttctgaatcatagaattcctggtgattgtgttaggagcagaaagggcacgctttgactactgagaccctgggctatggttgagaaaggccagagaggaaattcctctttggatttgtaaacagacttgtaaacctaggacgttttatgaggacttcattaggagacaatagattcaggaccctgctgtcatttttttttatagtcagaattagagtgaaatgacactttaaaataataatttctcttttcttactctttctttcagtcttcctttcaaagctattttaaaaaaatgcattgtactttcctaaccttttctctagtttagtggccagctcttattttcatcttgtcagatttcttctcatccttttacgtctacagccaggaagcctcagtaaattactctcctggagtcacagctgctttcttcctttgagaaacaatattctctagctctcctttttctctttcctgtagagttatattcaacagatactatttccttgtctaagaagcagtcatctttgaattttgcagatttaatttcattctggtagcttcaaacttgaaaacacgatgagtgatctgatatatttatttccatccaagaatagcggtgcgtctttttcacagtgttggggcttggttgaggtcattcctttccatctgagctgatcatgtatcccatcggtgtgcactcacatattttagagttgttgaatgctcattgaatgcagggtaccattaaattttgcaggcttctttctaactgttatttatactccctgtgaaaacttcagttatttttgtgacagacattattttaaacggacagtggtgacagtgactatccattgattatttttattgaattgtcctcatgtgtacatattatggtccaacctttttaacatccttgttatgacttaatttccattgtccttatttagcttgaaaatttacattatttcaacgatttatattacttttgtttacttaattaaagccccctcttgctttgagttttctcaatgtcatactagagaacaaactagtacaggttcagagctcaggtaccagtgtctgagtgcctgtgtttaaactgcaccttgccaccaaactagttatatgacctgggcaggaaacacaggttctttgtgcctcatttccttttctctataatagtgataatcatatcacctaactcctaggctgttttatgattaaattagttaagtcatgtaatatgcctagaatggagtggcacacagcaaatgctccacagcggcagctattgtcttcatcttttattgttgtcacctggtgaggaccacatcagaaagtttatcctcaaaatctcttacaaaacctcatactagaagtgggtgctcaaaacaggtgtgaagtaacagtggtaggtagaaaaatgcactcccacccaagatgtcgacttccacttggaacctgtaaacatgttaggttgtgtggctagtgggaattaaggttggagatgggcttaaggtttctctcagctggttttgagattaaggagattatcctggatcttcctgtgggtctgatgtattcacaagggtcctttaaatgtgaaagagggagacagaagggtcagtttcagaaaaatgcaaagtgagaaagactcaacgggccattgctggccctgaagatgcaaggagaccaccagcccaggactgctggcagcctgtagaagctggaaaaggccaagaaatggaaaatggattctcttttccctagaatgcagccctgccaacaccttgattttttttttttttttttttttttttgagatggagtctcgctctgtcgcccaggctggagtgcagtggcgggatctcggctcactgcaagctccgcctcccgggttcacgccattctcctgcctcagcctcccaagtagctgggactacaggcgcccgccaccacgcccggctaattttttgtatttttagtagagacggggtttcaccgttttagccgggatggtctcgatctcctgacctcgtgatccgcccgcctcggcctcccaaagtgctgggattacaggcgtgagccaccgcgcccggccaacaccttgattttaccttgaacgatttcagacttcagacctccagaactgttgtataataagtttgtgttattttaagccaccaagtatatggtaatttgttgctgcagcaataagaaactgatatagtgaccgagtgaatgaaaatattagttgtttgagatcatgacactaaaaaagggcagattttcattatggtaatgacgtaatgtctggtaccatttcttaaagcagcagattctaaaccttcctcgatcagactcattcttttaaaataattcagtgcacaaaatcataaaatttaatggggcccataaacctcactgaagccctccattggccccaggttataactcttaagtttgcatgggatttttaaaggctcagtcagtggtgaggttttaatggtgagcataggaactttctggacagagcgatcttatgctttgaagttctaagtaaatgaaggctttgtgaatgctcatcaaagctacatggtaatttagagatctgtaccccttgttgttcagtcaaactgaaactttaaaattttcttttccatttctcatctactgtggcaatgtcatgtcccgtcacatgagccttctgtactcaccacttttaagaaagattttgcatcattagaataattaagttggtgttctaaaaagtgatttgaaagctaaagtaacattagcatgatggttatttttaataagccttttcccaaggtctcatttgttttagagctgtcacgaaaacaggtttttatctctgtatcaggaagtgtcaacatttagaggagatagcataggagggggtatgctgtctactggtacagttctattaattcatttagtaagtattgatctaaggccaacttagttccaggcatggtattagggatgagagatgccaatgatagagaaactggatgtagttttagtcctcaaggcacttatagtcttattctgatctttgttaaaaagcaaatacccatgcatccgacaaaggtctaatatccagaatctatggaacttaaacaaacaagcaaaaaaaacaaacaaccccatttaagaaaatgggcaaaggacatgagcagacacttctcaaaagaagacatacacacagccaacaagcatatgaagaaatgctcaacatcacaaaccattagagaaatataaatcaaaaccacaatgagataccatctcacaccagtcagaatggctgttattaaaaagtcaaaaaaacgagatgcttgtgaggtatgaagaaaagggaacacatacactgctgatgggagtgtaaatgagttcaactactgtggaaagcactttgaagatttctcaaagaacttactaataaaacagaactaccatttaaccaagcaaccctattactggatatataccccccaaaatataaatcattctaccataaagacacatgcaagcacatattcatcacagcactattcacaatagcaaagacatggaatcaatgtagatgtctatcaacagcaaactggataaagaaaatgtagtacatgtgcaccatggaatactatgtagccataaaaaagaatgaaatcatgtcctttgcagcaacatggatggagccggaggccattatcttaagtaaattcatacaggaactgacaaccaaataccgcatgttctcacttataagtgggagctaaacactgcatacacagacacaaagaagggaacaacaggcactgggccggcttgaaggtggagggtgggaggaggatgaggattcaaaaactacctattgggtactatgctcattacatgggtgacaaaataatctgtacaccaaacccccatgacacacagtttgtccgcggaacaaacctgtgcatgtatcccctgaacctaaaataaaagtcggacaggaaaaaataaaaagcagataccctctggaggtatggtttaaatgttgcagccattgtttactttctagcaaataggtttatcagatcttgtcttgaaataagcttccctggaggagaaaggagtttagaagtacaaggagagcctgaggggaagagtagaatttctgtgagaagataaaaggcatgataagtgtatactgaggccagtgagtaataccctcacttgtctcttggatttctccaatagtggatcctgactattcttacaagttcccctatagagtaattgacagtgagatcatcccaggcctggtttgaagcccatctttgtgactcagtaaatacattggttgtcctagtgtgtctggcatttcttgcagccctctgcatggaacttgccgtggccatttgcaaggttgctcctgtgcagtcagtgaagagctgccactacatgagttgtgatttcacacacaactgcaatatcttctcccttagcctggaccctagaagacctaggacattctccaactagatttgctgaaggactgaacgtgggagtgagatcagagacatgtattgtttcttgttgctgctataacaaattatctcaaatctaatagctaacataatacaaagttaccagcttgcacttatgtaaggtcagagttctcaaatgggttggcaaatgggttccttctaggggctctaagggagaatcaatttccttgccttttccagcttctaaaggctgaccatattccttggctcatggccccacatcaccctcacctctgcttctgtcatcacttctcttgactcctgcctcccttttataaagcctcttgtgattacattaggctcaccctggtaattcaagataatcatccaactcaaaatccttcatcatagctgcagagtcccctttgctgtgtaatgtaaggtattcagaggttccagggaagaggacatggacatctttagtgccattattctgcctaccccaaggtgccaaggatgacagtaccgaaacagctgaagtgctttctttgctaacagcctgccaaccaatacctaagctccacctagtttttggagctacacaaacctttataactccaggatggcccttttccattttccattataatgtatgagatagaaaatatttcaatgtgattagaattagcagtgtcttatctcacacttggctcagtgggaaaagttggtggaaagtgttagatttccaggctctgtgccttgcctttgcaggtctgtaaattcctcatcagattcctgatgtttcagtaactcctcatcccatgccttttaaagtgtgcttcaaaccgcatatttttggaggaatatgacataccttttcaacacgtgtttgtctaaagctattctgaagatttcagttttatgtcttcttagaagtcatcacaaaacttgatttttttttccagataacttcaaaagtctaatggaaaagagaaaggaaaaaatttaaagcatctcaatggagtaagtgcctttgccagaaacttttctgggttcctttctgtccaacatctaacctctaggctaaagcagacaggaaaggaggttgcagggttgagcctggaggcaggagatcagctctgagccaggagattaggcaatagagctggaggcctcagagccagacaaacagaagttccaaagccagataaatgagagatgcatataggagaccagtggacaaaggaggggttgaataatgcttgcagagtggacagctctcgcacatgaaaaattctagccatggtgtcatcctttgtacgtgcttccgaggggccaggaagtttaaaaggagcagaactatctttcctgctgcacggcacagcattgtgttatgtggtcctgcaagtctctgtcactccatcatctgaatctgtgtcacacactcatactttaatatgtattctctttttttttttttttttttttagaaggagtgtcactctgtcacccaggctggagtgcagtggtacgatctcggcttgctgcaacctccacctcccgggttcaagcgatttgcctgcctcagcctcccgagtagctgggactacaggcgtgtgccaccacgcccggctaatatttttgtatttttagtaaagatggggtttcactgtgttagccaggaaggtcttgatctcctgacctcaggatccgcctgccttggcctcccaaagtgctgggattacaggcgtgagccaccgcacccgcccatatatattctttatgaaattaaaacttcgggtctgttatgtgtattatcccctaatttcatgtcatcaggcagaccattaaatacttttgcatggggaatgatcatatgtaagtatgatctttaaaaatagcttatagaaataatatgtatttattcatttatttaacatatattgatcatgagctatgtgccatggattcttctaggcaccgagggtatggtagttaacaagacacataaatgtattgaggattgtctttaaggagcttatgttctagctgagagttacaacaacaacaaaaataggtacaatttagggaagaaaaaatggggcaaatatgaggatataaagtattaagaagggctgaatttgagataggatgatcagggagggccttcccaaggtggggacttttagcaaagcctaaattaaatgaggggactggttagtggatatctggggaaagaacatactaggtaggggaagagccaggacaaagaccctgaggtgggaacatgcctggagtgttcaaagaacagcaagagagccagagtggctggagaaaatgagcaaggcggggcagtagtcagaaggaagttggcgtgtgtgaggagagggtggttcatagatcttaggagatcgtgtaggtcacagcagaggctctgtcactctgagtgcatgggacatcactggaagcagctgaactggcaatgatgtgacctgacttttattttcatatgatcggtctggcctctgtatggagaagggactacaggaggcatgggcagaattaggtgcagcatttaggggactgttccaataatctcaaagggagatgattgctcaggccagagtgatggcagtgggagtgacatatgcttgaattttgaggggtttgaaggtagagctagaacaggatttgctgactgtctggacatgggggtgagagcatgtggaatcaggaataatcttaaagttgttgacctgagcaactgaagaatgaatagaggtgccattaactgagatggaaaagatgttaggagaagcaggtttggggaaatcatctatagttccactgggacatgttcagtttgatatgcccattagacgtgtcaaataggcagttggataaacagatctggaattcagaaaagatgtgctggctggagatatgaaattttacacacacacacccctcaacaagccatccactctcacactttctaaaaaatctgtcacattaattctagccttcattcaaccctacctttcatatcacctccctaccttggcctaagtctcaaagttcttacaaaaagctcttgtcccattggttcagggcttcttcccacattctgatctgattcctccagatcacatatcctggcctcagtgcttggattctcttgctgagcctggcctgggagttgcaaactcctctgcatagtgctcagagagttgaagtaattcagtgaggtggggagtttgggcaactgcagagcacatgccccacctaaagagggcagcactggtcccctcccacaaagtgctcctatcagggagagggacccattgttgcccgttcttctagttaagctagaaatctagatttttttaaaaaaatgcataatctgctaatttttagacattggcaactaactcaaacattttttcaagaccctgtgagccaaacaaaatatatctggggccagatccagcccgcaggcagccacccttttaccaatgatgatcccactgaatgggctgactggctggctttggcatttggcccttggatggagccaattgaggtatccaccttgggcttccctagtgcaggctgaggccatgaaccaccacaccctaggaaggctcttggggtacactgtcccctgagcctggcccccaaggacctgcttatctgaaaaggaggatgaggtgccttccccgggaactatttgaagagcatttggtcccctttccccttcaccccttccctccagtgttgtatctcacttcaaaagcagaatgagtattgactccatctcttaggtgagacaggtaggagctattgaatcagcacatctgacatctgtcttaaatgcttgatggtgaaaaagattgcaaaatcatagctgaatgacagtctgaggcagaaagctagtcttgggcaggtagaagaaactatatattttttcaacaattatttattgaatacctgctagggaccagttattttactatgtgctgtgtgtacagaaaaaagataaaatgccatctactcctatgagattcacagcctcttggaggagacaaatatgaaaagaaacaaatcatagcatcatgaaaagaaccacaggccagcaatgccacagaccaaagatgagggtggggggcggtggggagtgggagggctgtcaaacaaggtgtggtgttgcaggactttttctttcttcttctttttcttcttcttcttcctcttcttcttcttcttcttcgtcgtcgtcgtcgtcgtcttcgtcttcatcttcttctttcttctttcttcttccttcttccttcttccttcttcttccttctttcttcttctagtctcactgtgttacccagcctggagtgcggtgaggcaatctcagctcactgcaacctccacctgccaggtttaagtgattctcccacctcagcctcctgcacagctgggattacagatgcatgctaccacacccagctaatttttgtatttttagtagaaacagggtttcaccatgttggccaggctgatcttgacctcctgacctcaagggatcctcccgcctcggccttccaaagtgctgagattacaggtgtgagacacagtgcctggcctagactttttcttagttcagtcagagacggggttctttgtcccatggccatgaaaattcaggctcgcagacaatttgaatggtgactaaaacagggttttattgggtgaaaaggaagaaaaggggggaaacagggtctctcactaggccagagtccctgctagagtgcttcccacctggcctttggaatctcagtttccacatagaaagagtgggggccaggctcctccccaatgcaaactgtgcaaacttctcaaggttccaccccagtgtgcattcctcccagtgcacaggctggttagagattctctggggaccctctcccgcctggctgtctcagtggtagctgagccaagttttggaaaatgaaaaggagcctaccaggcagaccatggggggaaaccttctagaacatgggggcagttcaggaactctgtagtcttagtgagagtcacacttttccttaaagggtgaaggaaagggcaaagctgggcaggaggggagggagagagggtaggagagagtgccaggtagtaggtcctgaaggaacttgtccaggaggaggaaagacggcctcacagtttcccatctgctagatgggctagtggcaaactagagggctgagtggcaaacataattttagtttgagaggtaaataaacaaataaacaaaaatctcctttcttctcccaaaatttatgccaagaggagagccaccatccacctaggcaacttaagaagaaagtttgatgtaatcttcattaattacctagagatctcatgctatgcatataagatatggaacataatagtaatatcagacacttccatggtgtttaccatgtgcaaggcattgtcccaagggctctatacacaggtgcatttgtagaactcatttaattctcacaaccatcctatggttgtgtaactcatctatttctctttgtagttaagcgacttgcccaaatgtcatgtagcttataagtgacagaaacaggcatggaacctaggcaggctgcctctaaaggacatatatctatttctaccatgtcacaatcctcaccaaaggctttggaaggcagatagcaaacctccagcaaccagagactgtgctgctgtgtctgtataaaactatctctctggcgttgttgagagtaaaaattaaaagtgccaatcaccagagaccccaccttaattcaaagggcaatgggagctgcacattaactgtggctgccctctgcatactgctggctgtgatgtcaacactgtgtttatatgaaatccttcagccaatggcagcatctttaaggcatcagccgtttgcttgcagaatgggcttctcagttttttacgcattttttttttctttctagaactgggttcaggtggataggctctaaatagaataccatgccaatgccaattatattcagaaagtattgcaatttctctttgatgcttatttacattaattaagagcaaacttagataaagaagggtacaagtttaaatgctaaaatcctgaagtgagatactttatagtctggaaaaatatacagaactgactttccttctgaaaaaaaaaaaaaaaaaaaaaaaaaaggacaggaagaaaagtgaaagattcagatgacatttctatgaggaaagtggtaattgtgattctcagggtgaatgcttgtctttttatttcatgacaactttttttttttctggaaatgagctttaaactttccacacatgttaaaaaatattttcacgtgcagggaaacagattaattttattaataccttaattatttatataattgacaagcaagcatacaaataaatatcactgagggagatatttgtgaaaatttttaatggacatattttgtgttttctgtgagctgggttagttctattagaaatctattttaatctaatcagttaattactaagatgtaaatacggcatggggaggattttacttttcagaaaaataggactcaattttttcaatttttttaatgttatgggaaaactccaagaacaaaaaaagcaatcttttacaaatatgtgacttcttttgtttttatgtctcatttttcatagaacaattctattcctggcattttccacccaatttgagaccatcatagtccactgaatatagatgcccttcactttgggtcacaagtgtaatcctgaaaaattgtagaccagtcagagttttctaagttgaatcagctaaactgcatgcacttttttttccaaggggattctatgggaagtcctttggggaaatgaataaaaccatttatatgacaatatcttcatttgcctatttttacattcggattttaatctaccagtttattataaagtagggagtttatcatagtttattataattttactttgtgtatgttgtacagattttgaatgagaaggatcttaaaatactccagaagtttttttgcaaaatatttgcaggtaggtgctcatcactggttggggtgggacaaattagaagagacagacaaggagagtttcaccagcctcaaggctacagagggaaagagaatccaaaattcccacattcgttgttagcgttcttgccagtatatcctttcaatgttgaatacgtaatttaaataagtctgaaattaattacagtttatctccatcacaactctatttttagatgtcaaagtgcactcaagtcaaactaccagtcaagatcttgccgatctgaacattcagtgcctctctttttaaaaagaagttgcccctgtaacagcacactggattgttctattgttaacactaaggagggaacttcctgatttttttcttcatttttagttagtggtttctaaactaaaaaggaaacattgaatggtgcttagttttaagtctgtgggttaatgcattattttctctccccacacccactttcccctttcctcatcattatcttaagtgatgtgtttacttattgatgctctcgggctgtcatttccgagtctgggatttccccttctgcttttcagttgtaattttgatgagcagacaaggtggtatagagaacagatagaggtggccctgggtaacccctctcattggctggtgacagaatgtctaagaccatgaagcatacaatccacctcccacacagagggatgcaccaaccaagttactcttgtaagtgactgagtcctccctcagtcatttctgctattctctgtgggaatttcaaagcaagcatttttgtcttaaggcagcaaggtgagggcttcaaggctgataggtttcacctctaggggcagcgccgactatcggcagatactgaagctgtgcattgaggatggtgaggctggacctgcaccaccaggaaggagccccgatcgattagaaatgtctgccttgggtaaggaagaaggaagtggtgtacgtgcgcgccatatgttgtcatctccctggtactatgtgaacaccatatattgtcatctccctggtatggagcttacagatcttgactggtaatcaggaaactggggttttcatcccaattctgccataatgaccagtgtaacgttgagcaagttaaattcccttactttggtttcctggtcttttaaggaggcgtgaactctccctctatataaaccttctagacctcaaactctgtgatcccaggccccatcacctgtggctgtccattgttcatgagataagtactgaatcttcatcttggtctttagttctctcccagtgtgaccttacactactttttgggccgtgtcttcaatttcttattcatactggccaggccagattacctatggtttcttgaacatgccacacactttcctgtatcgatttcttcagtaaggtctctacctgcaatgccttctgtctttccctcttctctgcttattaaaatcctacctattttttattaagactctgcgcctcatagaatttcttctttatgggaactttattactttactatttattacagttgactgtggatttttcaagcggtccttaactaatctgtaaattcaaggtggataggatctgtgtttcaagcatccagtgtccgtggactctcttcaatgtctaatcaggctaacaaaaggtagtgaacatttctttaaagaggaaaacagaaaccagggaacaatgatagaattaaagtggcaagaagatacatttaagttagcacatacttagtatcttttgaatttgggcaaaacaaggtggtaggtacttcagtggggacaagtaagagtaagaaatagtctgttttcaaggagcttataacataataatgataatgataatattttccatttattttatgcatttttaaccacaccctttacgtgcattatgcattcctagaacaactctgcaaggtattatcatcactattttaccaataacaaagatgtagcccacagaatttaagggatttgcccaaagccacacagccagtacctggatgcctggcttgagaacctgagctaattacaggactgacattgcctccctggtggggactgtatgacaaggactagcagaaccctgtgcacacactcacgactttcacatttccacgcctttactccgctcttcaggccacttggaacacttctcttccacacctctcagcttgtggaattgcttcccatgcttcaaatacatcttggatatctccttgtcgaagcctttgctgctgggctcctgataaggaggggctctgtgcacataggcaaaatgaatgcattaatgccaacttcatcttcttttccattaggaaggctctaagggtgaggtaaggatatctaataaaatgtgacgagggaattttgtttcattcagcaaacatccatagagcacttggcaaagtcttggtagcataccaaggaagttgtgttaccaagaggaagacccctagtgtaaagcaactttcccctgctttctaaaagaggctgtggcaacacccatgatgacatcaacctgtaggatttatgctgcctggagagaattacttcttgtctcaggcagaaccggagaggttcccagagatctcttgtctctttcctggtcctgctccacgtggctgggagggttgggggtaggtgggcactgatgtggagtggacagtctcagagggacttatttgctggtagttgctaaaccagaatagtcttctggaagaccatcagaacttcttccctccttgtttccaaggagtgaagggtcaaagtaaagccattattggcatagtttctattcattgatttccctgttagtaagtgatgggtttgaaatgtgatccatatggctcacaggggccattgagcacctgcttgcaggtgctatggagtcaaaggtaaacaaggcacatccatggctgaaaggtagctcacataacttaagtacgtgtcttagtccattcagactgctataacagaataccctaaactaggtggcttataaacaacagaaatttacttctcacagttctggaggccaggaaggccaggatcagggcacctgcagatttagtgtctgatgagagccttcttcctcatagatggtgccttttcactgtgcccgcacatggtggaagggatgagggagctctctggggctgcttttataggcactaatcctgtaatgaagggccagctctcatgaactaaacaccttacaagggccccgcctcctagtactattaccttgggggttaggatttggcagacacacaaacactcagtccgtagcagtgtagagtggcatgtatcatgtgggggtcataatggaggtgtgtaccttgtattgtatgagatcagaggaggctgtagggtctgttgagcctgggagtgtcagagtatttcatggaagtgttggcatctttgcctggatttgaaagatggatgggatttcatcaggctgagaaggtgggataggagggcactccaggtagagggaacagcaagtgcagagataagagtagggagagcggtttggcatctgagcttggggactgagatcagaggcatagtaagaatcacaaattttggatttctgtttcaaatattactgatgtttatgtgatcacacagtgacccaaggttgccagaacagacatttcctccctgccacatgtgtcacacaggcctggctgcctcctttcacccctctccggcactcagggaagtggctgcccacaccctccacagaatcaggtgcccatttgccccagggccacatgcttcccccagccttctgcccacagccctccttgacctgcttcctgagctcagcttgccagagactgcctcagtgccccagcattgtttactgtctgtgcagtggctaagaaggggccagaatttatttgttctttccccttgcaaagattgtcagctcctgggtgacagaaaacaaaacaaaatacgcaaaaaagcctcaccgccccgatggtgcctcacgaaccctgccctttcacagccagccttgaccttggtggtatcaccgcctgatccactgggaaaggagctgttctgttatttcctctgccagctttctctttccatggctttgctttccaattaaaaacacaacaaagcaaaacaacaatcatgcaacccccaaatcctctctgctctttatcctcaggtggtcagtgtttatactgtttttgattttagttgagtcatcatttttatagaaacagcatcattgcatgtgaaaccatgtgctttctctgccttgttcaggcagtgatgccagagtaggccagtccaccatgtctgtaagagcagagctcagagaccaaccagctggcagtgggtttgaggagggctggagggcgtctggggcttggaaagtaggccctgtcccttgcagcgaagcacagacattagatgtgatctgactgtgttgcaggtgatgggaacaagtctggccaggcagttgaaagtgtgggccagagcgtctggagagaaagtactagagcaggcagtggtcctagcagctggtggcaatatcaggaagaagtgacatgtgctatcggaccagagacctgagctctagactggcagccacatgggacactggttcttgcagtcagacctgccttcagcctgctcccttgccaacctgcgaccctagtcttcctccagctcattaaccaagtctcccaccctgttgtctgcagctttcagttcttcctcttaacttctgctgttgtgacgttagtttgggccctgcgtctcacccggatggccatgatcaacctgctgatgaattccctgcctggagtctcctcatcaggtctgcctttaggccactgccaggtgtcattccccaaaacacagttctgatcgtgtcatcgcactatccgcagagctctggtggttccctccctcttaagcctggcatttcaaggcctcagtcttctctgcctctcttgtgctctgaatatttcctgtagattcttacttttttcccagtgcttcaaacctgaaccctcagcagcatctactggggaaacgaaacatacgattctcaggctctactttgagagacacacaccagtaagttgggtgctggaacctgaatacttcatgttttaagctctggccatgtgactctggagatgagccgggcttagaatcctgtgtctctgtcatgccattcctgtaccctgtgtgccctctctcatcaccaggcctatctgttcttcttgttccagatcagttgttacttcctcttgaggagttctgtgattccagtagtcaaaaacaagttcttcttttgcccctgttttggtcagggttctctaaagagacagactcaatatgatagctagctagctggatagatatagagacaggagaggtgatttatttgggggattggctcttgtggttatagaggccgagaagccccatgacagcccatctgcaagctggagactctggcatgctggtagcatggctcagtccaagtccaaaggcctcagagccagggatgccgatggcataactctcagtttgaggccaaaggcctgagaaccggcggggctgctggtgtaagttccggagtccaaaagccagggagcctgggcttattgttcaaggacaggagaggaagagtgtgtcccagctccagcagacagatggacacattcaccttttctctgtttttgttctttccagacccccagctggttggatggtgcctgcccacatggagggccgatcatccccacctaacccactcagactcacatgacaacgtcctctagaaacaccttcacagacactcccaaaataatgctttactaggtttcttttctaagtgttctttaaccaggcaagttgacacctaaccgtcacaacccgctaggttgtcctgcggcctttctgctctaagccatttgtctttttcctgctggattacaggttatttgagtgtagagaatgtattcatccacgtgtatcttgcagcttccaggaaagcaacttaagcttaatagccgctccaatgtgaaagatattatggaataaattgtcaaaaaagacagatattacatttacttttgtgatagtttacatctataaggaaaaaataggaaagacttttcaggaatggtagcgacatgaataccaataaccaattccattctttaaaaatttaaaaatgtgaatttaaacaagtggcaattttagttgtaaaaccatatgtaagaattaccttttcttctactctcttgcctggtgaagagagtctaaggcttctgaatatatctgcattgccaagaccttaccgacttaaccatatttagcacaacatgtgattttattgttcatctgcaactatgttgtctgttatatttgcttctgttcactaccagagacatcagttagctcagatttctattaacaggcataatgtcatggcactccctgggatgaaagaaagagagcaggaattagccatttgtagcttttacagcaccacctttatcaatatattcccatttaaaaatatccttttatctgcattgcaaaaatgaaattatatagccattaccaaaattagataggagattcattggatcagaagtgctttctttctaatccttaaatgaccaaagggttcttctttgataattctataacagagttaaaattccttttatcctgaaatgttacagataggagattaacctagttatgcttcacccatgtaaggagtgcatgtctcacagaatcaggcaacagcaacagaggtgtctgatgtaggaaggtacagaagacatgagactttcatgaattataacatgactccttaaataatacaaaagtactttacaaataattagactattttagactaggaactctgatttccggttaaaccttaagttgcttcctacttgttgatgtgtaataatgtacatggagcaccacacctagtaagaagactcttccctttttttacctgaacttcttctttttttttttttttttgaggcagagtcttcctctgtcacccaggctggagtacagtggcacagtcttggctcactgcaacctctgcttccagggttcaagcgattctcctgcctcagcctctcaagcagctgggattacaggcacccgccaccatgccaggctaattttgtatttttactagagacgagctttcaccgtgttagccaggctggtctcgaactcctgacttcaggtgatccacccgcctcagcctcccaaagtggtgggattacaggcatgagccactgcacccagcttgcctgaacttctttacaatttagtaatattttgatcacttattaattatgggcaaggatggcaaaattgaatagaaatactaaagttaatcagtaaacatttgttatatatctaccatgcaggatgttttgcaagggattatgatttaaaataaaataccagaccaggcatgtggctcaggcctgcaattccagccctttgaggggccaaggctggcggatcgcttgagcccagcagttcgagatcagcctgggcaacactgcaaaatcctgtctctacaagaaaatacaaaagttagctgggtgtggtgacatgtgcctgttgtcccacctacttaggaggctgaggtgggaggatctcttgagcctgggaggtcaagactgcagtgagccgtgatcatgccgctgcatttcagcctgggcaacagagcaagattctgtctgaaaaaaataaaataaaataacataaaataaaataaataaaatacctgccttctaataagattactttttagtgttgttatagggatgagatatatatcaagcaccgaacatggtgagtactgaataaatgcgaggcagtgttttcaaggtaacttcgtgtaactaacacttacacagaatttcagagagaataagataattcagacatattagtaatatttgataaacagagatttcactctttcctcaacatagtgttctgagattgaaatgaagagaaatatgtcagtacatgaaaactgtgagtgtttactttcaactgtgaaaacgaagccagatttggaactagtaaggtattcatcacaaaaatagaacctaattatatgtaattgaagatagggcttgatgcatggcacttattttagagattcaaacatgtaaaataagggtgacagtggtttttgaaggtgctttaaattttatatccatctcaaaaatcttacacatgctatatatacttaaatagaccaaattcattctcattaacccacaaacagcaatagaaaggctctgggctaggagagaaactgaggtttaggtaaaaattttgccactgtggcaagttgaataatgtccccccaaatttatgtccatccagaaccttagaatgtgatcttgtgatctcattatgcaaattgggcataataaaacctaccacataagattatacaggattttttttttttttttttttttagacagtcttgctctgttgcccaggccggagtgcagtggtgccatctcagctcactgcaacctccaccttccaggttcacgagattcttctgcctcagcctcccgagtagctgggactacaggcacccgccaccatgcccagtgaattttatgtatttttagtagagatggagtttcaccgtgttagccaggatggtctcaaactcctgacctcatgatctgccagcttcagcctcccaaagtgctgggattacaggcgcaagccactgcacccggccgattatacaggattacacgagatagtctgtaagtacttggtacatgcacagttggtatttatttgctgtttgtctaaaattgcattctttgttttttttttttttttttttttttttttgagacggagtctcgctctgtcgcccaggccagactgcggactgcagtggcgcaatctcggctcactgcaagctccgcttcccgggttcacgccattctcctgcctcagcctcccgagtagctgggactacaggcgcccgccaccgcgcccggctaattttttgtatttttagtagagacggggtttcaccttgttagccaggatggtctcaatctcctgacctcatgatccacccgcctcggcctcccaaagtgctgggattacaggcgtgagccaccgcgcccggccctctaaaattgcattcttatgcatcttatagagagtgagatttcagtttaaggagaagaaaaaatattttctacaggaccatccaaacatgtaagtggcttctcatgggacagtttcccatcacgggaaagatataagtcgattcttagtcatccagagtgttgaagacagtgtatcagttagagactgagtttcagtccctgtccaacagcaactcaactataggggcttcatcaaatagggattcccaagaaagttttcacataataagatgtgctgagttgtgtcttcaaggctggtgtagaagcctcctgatgccatcagggacccaggcttcttctctcttccggcctgtcatccttatatgtggcattcatccatgctgcctgaagatggctgccctacctacagcctcacttgctcattccagcagaaagaagtgtcaaggaggaagaggtggctcatgttgacaaagcaaaacttttccagaaatcctcagcacattcagctgaattcttattggacagaactgggtcacatgaccactaataaatgtgagagtctgggaaatttagtttttagctggattcagtggtgctctgaacaaactaggcattctgtttgtgaggaagcagggaattatggatttggggtaggaaactagcagcatctgctataaaagggactctggaataggtgggagattgggctagatgagccttccaactataggattcaaagatgaacttaatagatttcctaccctcaaagcattgacagtttatattggaggcagcttttagagtcaactatgtgaatttaaattcagttttatcccttactaggtataaaattctggtcatgggcaagctatttatcctctctgaaccttagttccttcaactgtaaaataaggatgatggtgtctgttattttgataattatatgagttaaatatttaaagtgtcaattatactgtttggtaggagtagatgctaaataaatgtagctattttttttttcttttcgagacggagtcttgctctgtcgcccaggctggagtgcagtggcatgatctcggctcactgcaacctctgcctcccagggtcaagcgattctcctgcctcagcctcctgagtagttgagattacaggcctgcgccactgcgcccagctgatttttgtatttttagtagagacgggttttcaccttgttggtcaggctggtttcgaactcctgacctcgtgatccatctgccttggcctcccaaagtgctgggattacaggcgtgaaccaccacacccagccgctattctttttctactagatgataagctctatgaaggcaggaactgtgtcttatatgtgtaccatggtcatctcagcacctggtacacagtacccctgtaatagatctttgttaagtgaattaatggaggagactagtgctaatgctagtctataaagctgatataaaacatattcaaagtaactgagacttgccttttctcaagtgaaatttgaggcatgtatctcaagcacgttctgtaacaatgaggaggagatactacattaaggattaaaaaacctaaggtataaggtaagaagttgttttgattaatgttgttagttgcagacaacagaagccgctctaaggagtttaagcagaaaatgacttatgacagggttttagggaccttagagaaccacgactgctccagtagtaactcccttgtcaccaccactcacacccagcattggttaccggggactggacatgagaatctctgcgagctgccccagaaaaatcacacatactaggtctctaggaggggccaatctctctgtacagccactgcttggcaccgtctcctttcaaatgtcatgtaaatgtgtctgctcctcagagcctgggtcacatttagacttgttgtgcaagggagtctgggaaatgtagtttttagctttccagtttctgtagttcaagcaggtttgcttaaaggagattggtcagagtgctcaactagcaacaccctgtctagcacagaagtcattctgagcaacggcatgcagttgtcctaccaagagagcgtgcaggtcatagagtggtgagaccactgggaggaggtactggaagaccaggggaacacaggaaagagttcaggtccatttacaccaggagcctgccagacaggcacccaagaatggacagtgggttactgatggtcatagagaggggcagaagaggagaggggtggaagtaattttccctggacatgcccggtggattgtgtgcagagggagacctgcttctgcatttccctttgcctggtcactgtctcaggcactcagtttcagacaggcatgtggctccagggaaggccatcgagctcacttcagagcccagccagccccatcccggcagagtcaggatgacaaaggcagggctcctgtggcctggcccatgtgacccccagccagtcctaaatcttggggcgtgggaaggaataatcacgaggcaaggaggagacggaacaccctccacactgagaagcctttgttagaaccttccagccatgaggtcagaggaagaagctgagtgatctcttaaaaaaatatgtatatatatattagttgggggttttctttttctcttgtctttcttttcaatctaggtttgtgttttatagactgtgtgatacaggcaatgggacaactgggcagttagttggaactgaccttgcagacagccaagacggcaagctgggtgactcaagttcagaatgggttttttataaaaacaaacaaacagccatgattgatgtctcccttctcatcttttatatatccttttttatgggcagttgtggagaattggactggtttactgacatcatttctctctttgcaggctgatttcatcttagtcctttacacaggtataccttctgtaaggacagaatctatcaatgcaacttgcagtatgcaaaaaccattatctagaaactgattcagtttaatgctattaaatgcaatcagaagttaccaagcctcttactggaatgctcttccaaatgtaacttaatccaatttacctttcctttggtatttaagttcctgacagccagagcagacatttctcagacaagagtgatttgacttgtaacacatgccttttttctttcttttcgttcatttcatgtaaacaattaggtgtgatgttacagtgagctttcacctttaggttgtggtcagctctagacccagtgagaggctgccatgtcataaacttgatttaaatgccatgggtgtgccaggtgtttttgggtgaatgaatgagacatatgccctcaagccccagataacttctcagtctatttcagaatcactgaatcatgtgacagtatgagaacactttatctctaataaagctggagtgtaatgactcattctcacatagttttaatgtttatcgatttcaagtgttctttcttgataagaaaaggtttgtatgtgaacattcgaaagaagagcaacgggcattttttgttctttcaattttaacacaagtacaatattttaacctttaccttgtgatttttgggtgtatgcagtgcagcttgcctataggtgatttagttgttcgtttctgacctcattacaaagaagtggtggaagctgggtggatcttttcattccccagtatattctgccagaagctggtgctcatggatcatttgttcaaggacttaaagttcaatttctagtcaaggtaaattatggctacatcaggctggtctggcacaggtgatctcgatgatcttctgaaagctgtccatgtgggctccagggtagggaacctagaggaacttaggcaggccagggagccaattctatagtatttgaggaggaaccgatcgcccccccaccacgatccaaacctacctacagggccctctgttaaccaaagaccttgtattagcaaggagttctggctgaaaattccttttgtcattgggggaaacaaaccctaagcaatgtatgtgatactttcttggagcccaggccatctgggtagcatgagttttctttaaatacatcccgagtaaggcaatagatttccttcagagcatttggcaattaagactggggctgtcaactaggcttactgttaaaaacctgccctgctttcccaggctgcctggtctgaaattcagatgcctccaccagaaaataggtttactcacccattgtcttggccaccatcttccttgaccacacctgagtaccgtgaatgaccaccaaccctcactgaggccatttgccagatggctctaagtgtggtccatcctagccctggtttccatttggcttggtcacaccactgtgtcctatatgtgtctttcaatcgccacttcagtggcctgcggtcatctcaatacagcacatgtattaaaaaaaccaagcccagggagtatctcacagcagtttggtggtcttcacttcttccatatgccagtgtcagcaactctgctgtccctgttccttgggcacaactgttctgactgctccctctcctccaccatcccttcatcttttctcctttccactcctccacatatcccagcacctaggttacagctctaatctcttgggccctggagaattataactgaaaagatgtttttgcatccaatccattgtcttctttttacacatgaggaaatggcagcttcagagaggttagacaaatgaccctgctctaaactagttgaagcagagtcaggccttctgtccttcctcctgctactcggcctggcgatatcctgctctccctatttccagcctctcttcttttatccattctgtacactcaagtatgcagatttatctgcttttgtttttgtttttgagacggggtctcactctgtcactcaggctggagtgcagtggtgtgatctcagctcactgcagcttcgacctcttgggccccagtgatcctcccaccttagcctccagagtagctgggactacaggcacgtgccaccacccctggctaattttttttttctagagatagggtcttgccgtgttgcccaggttagtctcaaacacctggggtcaagtgatcctcctgccttggcctcccgaagtattgggattacaggtgtgagccattgcgcccagcccctcagatttatcttgatgaaatactactttcatctctctctcttgcctacagatttttggtggtccctatagctaggacaaccaactatgtaattgtcatccaaactgggtctcttgagagtgaaggagttgctagagcaacagggataaaccaggattatcctgggaaaaccaggacatctggataccctttatatagcctaagtcttaaagattagatgatcccttatggaatttaaggttttctacaatcaggcctcaaactacacttctaagctttgtgctcaagagtctacacaatattttgtttggtccagtcaatttgctcatccttcttggctcactttctgactatttctgctttgggatctggaagtgtttctctgctcgcctcatcttctgttttctccacggcctgttaattcccttttcttccataaagtctaagtctgttgcatctcccagaatgtctagctcctccaaagttgtgcacttgctatctgtactactaatttgacacttctgagtagtgaaatgaagtgtttttattcttttgaagtagtgaggacacagcttctgattattccttctataaatatgcctgctacaaaagcgtgagacccacaaaataacagagataaaaacataaaatgagcaaaactttcaaaagagaaatcagaactttattttactgatgagtgtgtagaacttagaactgtacaacctctgcaaagaggaatttggcatcatctaacagaagtacacatgcaatcccacttccatctttctatctttacaagtgtgaaatagcatatgtattaggttattgcctgtgccattattgtaatcccaaaaggttgtaaacaccaaatgtccagcaatagggaactagtagaatatagactgtggtgtagcacatagtggagtactatgtagcttaaaaaaaaaaaaaaaaagaatgggccatgttcagtggctcatgcctgtaatcccaacactttgggaggcggaggcatgcagatcacttgaacccaggcgtttgagaccagcctgggtaacatggtgaaactgcaactctgcaaaaaatacaaaaattagctggacatgggggtgtgcccctgtagtcttagctactcaggaggctgaggtgggagaattacttgagcctgaagttcaaggctgtagtgagccaagattgtgccactgccctccagcctgggtgacggactgagaccttgtctcaaaaaaaaaacccaaacaaacaaacatacaaacaaaacccaaaaccaaagaagaaggaagatctctatgtgtgagtgtggagagatctgtaggatatagagaagagagcaaggtgcaagaagattggatattgggtgctccgttttgtgtaaaatagggtgtggtaagaatgtgtgtgtgtatattcattatatattcactatataatatatatacatatgtcatatgtatacacatcttttatattggtactatttgcaaaaagaagttggtacaaacttcagttataagataaataaattctggggacctaacatatagcatggtgactataattaatactgtattgtatacttgaaatttgccaaaagagtagatcttaagtggcctcactctcccaccacacacacagcaatggaaacaaagtgtggtgaggatgtgttaattaatttggttgtggtaataatttcgctatgtatacatatatcaaattgtcacatcatacatcttgaatatatggaatttgtatttgtcagttataccttagtatagctggaaggaaaacagtggaaatatagatggaaactaatgaaaaatgattacccctagaggccggagtggaggtcagacttttctatgtagattcttctatctaattttttttcttttgagatggagtcttgctctgttgcccagcttggagtgcagtggtgcgatcttggctcactgcaacctctgcctcccagggtcaagcgattctcctgcctcagcctcccaagtagctggaattacaggcacccaccatcatgcccggctaatttttgtatttttgtagagacggggtttcaccatgttggccaggctggtcttgaactcctgacctcaggtgatctgcccatcttggcctcccaaagtgctgggattacaggtatgagccaccgcacctggatcttctatctaacttcggatttgagtcatgtcagtgcattatccattaaaaaataaaatatcaggtactttattttataaaattctttgtaaagtagcgtacatgtgattaattttgtcatctctcattggcagtattttcatttgcggaactgggtaaccttctggagaggagcatcagaggtgtgcttcagaaagctttttgggccactgagtgaaggtccattgcagtgaggaggggggaatctggagaaggggtggccatggtggggcgagggaaaggtgcagaaaaagtgcccagggcttccaccttccagccctggatgtagctctgccagccgggatcccttataagaagcttccttatgggtcagctattttctgactccatagctcagtgtttcctcttactacctttagccttcacgattttggagtacatttttcaggtgaatattttattcagcagtgtgattttccagcctgctaattctggacaccggacctgttttatgaggtggtgtctgtggtagtttctcccaatagcagaggaaagaaatcctttgttgccctcatcacgtttcatctcattctgacacatgtaattcacagctctttgagaatgtcatttagaaataatccccaattcataagccactttgcaattgtattgtattttctttctaatatactttgacccttttgatggggaaattagaacatgattttttaatgcagatttgggaatgacctattcaaagagaaactctgaaggtgataatgatacccccccacctacttttcagtcataatagatatccttcatcaagtgtcttcaggaattctctatccagctagctatttactttttcttgtgttttatgtattatctcctattattctccaaacaactcttttacagaatggggaaggacatggaggctcagagaggttagtaacttgcttgaggccatgcagcctacttaatgaccggcggagggggttggtgtttgcactgtatccattgcctccctaacttggccaagctctgtcatttccctgtctgctagtaccttccacttcatctccaaacccattgagagcagttggcggttatcttcacctcccctgctaggacgctgggatttcctccagcagggccctgtctcaggtgttccttcttagaaccttgagctcctgcttaccaccctaaggaccacaagtatttctctagcccacacacgttgtctggagtatctatccaaatgtacaataatttattttctcttgaaaacattatccctcagaatttaggactttgccttatactggaatccttacaaaggtcttttgccttaactagaactatagttcacttctttgaaccacagaaaatatttgggcagaacacattactgaaattacttcaaataaataccagcattggatgctcatagaggtcacctaatggaatgactttaaaaaggaaggaaatctgcacagtttagtggttatatatgggctctgccctcacaaaattgtatgttagatatcgttatacacaaaccttttaaaattagattattttaaagagcaataaagtaagtggtgcaccaggcgtggtgggttacacctgtaatccaagcactttgggaggctgaggcaggcagatcacttgaggtcaggagttcaagaccagcctggccaacatggtgaaacttcatctctacaaaacatacaaaaattagccaggcatggtggcgtgagcctgtaatcccagctactcgggaggctgaggcaggagaatcgcttgaatctggaaggcagaggttgcagtgagccaagattgtgccactgtattccagcctgggtgacagagccagactcagcctcaaaaaacaaacaacaaccaaaaaaacaactttctatctaactgcacagaaggtctcttctgtgtatcacagtactagtttgataagatacttagaaggaaaacttcaggtatttggaattagcaccatgtagaatatttcatatcacaaatacacatagttgttcttaacacatgtcaaagaaagtgttaaccttgctttgtgtcacttacaaaagtaacccttgtggttaatactttaaactatttctctatactaggctaaactaaagagagtgtattaaagagagttaaattatatcaggattagagtgtcaatttagatgataaagatctttctttgaaatcagtagagagaatagattaaatataattgttttctttgtgttgacttcattcaattctctaatccttttcttctttaactaattgtttctcttacttttgtcaattaaagtgaaccttccttactaaaaagaaactagattttaatgggtgtagactttcagttttgcaaaagagaaacaattctgaagatggatggtggtgatggttttacaacagtgtgaatgtgattaatgccactgactgtatacttgaaaatggtgaagatgggggtgcagggggagggagggcatcaggaaaaccagctaatatatgtcaggcttaatacctaggtgatgatgggttgacaggtgcagcaaaccaccgtggcacacgtttacctatgtaataaacctgcacatcctgcacatataccccggaacttaaaataaatcgtgaagatggtaaaatttatgttatatgtattttaccacaatttaaaataagaatcccttctcccctctcccctctccccctcccctttgcacggtcctcgtctcccctttgcatggtctccctctgatgccgagccgaggctggactgtactgccgccatctcggctcactgcagcctccctgcctgactctcctgcctcagcctgccgagtgcctgggattgcaggcacgcgccgccacgcctgactggttttcgtattttttggtggagacggggtttcgccgtgttggccgggctggtctccagctcctgactgcgagtggtctgcccgcctcggcctcccgaggtgccgggattgcagacggagtctcgctcactcagtgctcaatgttgcccaggctggagtgcagtggcgtgatctcggatcgctacaacctccacctcccagccgcctgccttggcctcccaaggtgctgagattgcagcctctgcccggccgccaccccgtataggaagtgaggagcgtctctgcctggccgcccatcgtctgggatgtgaggagcccctctgcctggccgcccagtccgggaagtgaggagcgcctctttccagccgccaccctgtctaggaagtgaggagcgtctctgcctcgctgcccattatctgggatgtgaggagcccctctgcccggccgcccagtatgggaagtgaggagcgcctcttcccggccgtcatcccgtctaggaagtgaggagtgtctctgcccggccgcccatcatctgggatgtggggagcgcctctgccccgccgccccatctgagatgtgaagagtgcctctgcccggctgcgaccccgtctgggaggtgaggggcgtctctgaccggccgcctcgtctgagaagtgaggagcccctccgcccggcagccgccccatctgggaagtgaggagcgtctccgcccggcagcctccctgtccgggagctggggggcagcccccgcccggccagccgccccgtctgggaggtgggggggcagcccccgcccagccagccgccccatccgggagctggggggcaggccccgggtggggggtggggggcagcccccatccggccgccgccccgtccgggaggtggggggcgcctctgcctggctgccccgtctgggaagtgaggagcccctctgcccggccgccaccccgtctgggaggtggggggccccctctgcctggccgccctgtctgggaagtgaggagcccctctgcccggccaccaccccgtctgggaggtggggggcccctctgcccagcagccccgtctgggaagtgaggagcccctctgcccggccgtaaccccgtctgggaggtgtacccaacagctcattgagagcgggccatgatgacaatggcggttttgtggaatagaaaagggagaaatgtggggaaaagaaagagagatcagattgttattgtgtctgtgtagaaagaagtagacctgggagactccattttgttctgtactaggaaaaattcttctgccttgggatgctattaatctatgaccttacgcccaaccccgtgctctctgaaacatgtgctgtgtccactaagggttgaatggattaagggcggtgcaagttgtgctttgttgaacagatgcttgaaggcagcatactcgttaagggtcatcaccactccctaatctcaactacccagggacacaaacactgcggaaggcggcagggccctctgcctgggaaaaccagagacctttgttcacgtttgtctgctgaccttccctccactattgtcctatgaccctgccaagtccccctctccgagagacacccggggtgatcaataaatactaaaaggggaaaaaaaaaaaaagaatttaaaaattaaaaaagtcaattgactgttaaaagcaaaaaaaaaaaaacaagttaatttaggtagagtaaatcattagactttttaaaggagatctgttatttcttagcaaaaatttaatctattgggaaatgatctcagaactaaccatttctctgaaatcatagtgaaatcaggagtgtagaaagtatccattgtggagcctttgggcaactttatgttgagtaaatgggggacgtgcttttagagtctagagactttgaaggaatagggacggcatcatgggctgcccttctgtggtgtctctggctatttcccagcacagtccacaacgctgcccctattccttcaacttctcctgactctagaagcaacttcaagtttccagaaagctccaagttgcctcctgactgtgcagtctccccatttcctcagcacgctcttggtttcctgcctggcttccttactctctgattactcattggatttgctatctgatctgttgccaaagaacagggcacaacttccactcgctctgctagacttagactggccaaacccactctcttgaaacctctggaaacctcgtgctcttttgagtttgacttctgcctccttaaggcccctgaagctgagcaggctgtgaatgaattaacagagctttgtaaattgcttaagagatgtgggtagacaatagggactcctggagtgaagacagaatgactgaaatagaaactttctgtggttagcatggatgtacctgcctttgtcactccccgaataaagttctttactttcttggaggcaggaggcaggcttgagagagacatgagagaagagggctctctctctggtttcggaaagcagtgggctggcatgtagggaggagaatccttgggcctggttggtgagtgacagctgaggaggaaaggctgttgatgtcagctactgtagtacagagagcatcctctgtcttgatggatgagcgtaacaacaaggaaaaggcccatgaagtctgttttaaaaggtaaaaatttgactgtcacatgagtgaagagtcacctcaagaagacccagtacagtaagctgagcactgtgacttgtgcctgtagtctcagctactcagtaggctgatgtgagaggatgaaaagttcaaggcctgagcaaagtagcaagaccccatcttccccccaaaaaagatccaacttagatattagtcctgccattggcagtgagacatcctgcccgaatggctgtcaaagatgtgtgtaaaatgtgtgtgtgttccccaaaacaaaccacatacttccagtatgagggcgccaagaagagtttcctaggaaactggaacaccattgggccttcctcactaggcattcaccagagggcctggtccagagtataaagtcttgataaatacttctttcttctgtaactcctccctcctccctcttcttcattccgtcaacaccgacaaagggtctaaggaatgggtgatccaataagacgtgaaacaggagatggtattaccttctaataggaagagtatatttcctaaaccacagactaaccatcttttctgccagagagaccagcaacagcttttgtcggtcaattacaaggctgtggtctttgtaattgttattctaatgtgtcgcaagatggtgtgaggaaattcaggtgggatctagcatttattgatcgtttatgagcaagagattgtgtttcaagtgttaaatgcattatttaatgttaacaggccccctatcatggcaggcatgaccccatttgacagtcgagggaactgagatttggaaaggactatgatttacccagggtcatccagccagggaaagtggagcaagattttgaaactcaggtccactccctgattctttccactgtagtgcattttccacaggagtggcagataggttctgagcactgcctgcctttctccttgctgccatcccttcgtatccaaactaggtccagacctccttccaggaagcctccacctcttctagtcgagaaacctagccagaaacctaggctgggcctctgtctcctcttttggaagagcacagatgaagtgcaattggcccttctccctcctcaaggtgagaagccaaggacactttgtgtctgaagtcttttaatggaaagaatcaatatgggtccaatccctcctttccctttgatgcttttttacctgtctcaagccccacccacccctctgctgtagtagctcttagaactttttactccgtgggcatttgcctggagtgccttgtgacctctcctgcattctccccagcaggcatgtcatccaatgcacaacgctgtatctttatgggacaactcagcgccctctgtacattaggcactaagtgcatatttcttttttttttttttaatttttttgagacagagtctccctctgttgcccaggctggagtgcagtggtgtgatcttggctcactgcaacctctgcctcctgggttcaagtgtttctcctacctcagcctcccaagtaggtgggattacagttgcctgccaccacacctggctaattttttgtatttttagtagagacagggtttcaccatgttagccaggctggtctcgaactctgacctcaagtgaccctcccaccttggcctcccaaagtgctgggagtacaggcgtgagtcaccatgcccggcctaagtgcatatttttctgtggcttattaaagcatacaaaaggccacctacttttccacagagaagagtttgatggagtgaatcctaaaacccagaacaaggcactaatacccttttgaattttctccagttttccattgattggaatgtcaatgtgtccctgttgtgggaatctgttatttgctgcctagatgaacaatttaagttgaatcaggccattcttcaagacagagtcctcccgatggacaaggagagactcaagagctttctgtgtacatgagctaggatcattcaagctgtgacttggggaatctttaatttggatgactctccttagagcagccaaatcagcttcttgctgataacagtaatcaggttttatactaaagtccccagttaggcagagtaaacaggaagcagcctgttattgatctgtgttatggaaggttcttttccactgaggagactgaatattttatactgaaaccttttacttcctgtacccagcatatttttcctatatatgtgttaggacagaagtccttttgagtatctttattttatttgtttagtgaaactcctgaaactaagggtgtgggaacaaattatccatatttagtatatgtggtgggttaaaaaatgtcatccatttttgataacataggaggaagtgtaaattgttagtttatcagccatttctaatggtttttaaaaaatgtccttcatccacggcttcaccagaacacacacacacacacacacacacacacacacacacacaatgtccttcaatttcataccatttgaaaaataatcttgttgagtattaggattggctagagttttttttaaggtaaaaagtactgtgtgcattttcaacttctcttgatctttgcatttggaggataataatctccagggagatttgaagataataaatagaggtggaaatgcacggatgcttctgcaccaattctcagggaaggcttttccagatgtggaatgcacggatgcttctgcaccaattcccagggaaggcttttccagatgtggaatgccatggggagtctgtctggcttggataattgacagctgccagcttgtaatgatctgtgctaaatggagctggagccacagaaggcaacacaacagctgggctgctgggagccaaggccctgcacgaggcacagctctctccccaacacccatcctcagcagcctcaccccctaaagaaggtgcactgttccaggaaaggaagggagtctgttgcttctacctgatgggtaagaggaaacaccttgattcactcaaatgggccacggtcagataattagagattcgctttttattgcattgactttagcattttaatttaaaaaaatgtttatggatacataatagttgcatatattttgtggggaacatgtgatattttgatacaagcatataatgtgtaatgatcaaatcaaggtaattgggatattcatcacgttaaacatttctcattactttgtgttaggaatatttcaattccactcttctagttattttgaaataggcaataaattattgttagttatagtcactctattgtgctactgaacactagatcttatctaactgtatttttgtgcccgtgaacctctctttattcccctctccccactactctgccagcctctggcaaccatcattctactctctatctccatgagttcaacttttttttagctctcacatatgagtgagaacatgcagtatttgtctttttgtgtttggcttatttcacttaacataatatcttccagttccattcattttgttgagaatgaaaatattttattcttttttgtggctaaataatattccattgtgtacgtgtaccacattttctttatccatgcacctgttgatggacacttaggttgactccatatcttggctgttgtgaatagtcttccaatgaacttgttagtgcagatatctcttcaatatactgatttcctttcttttggataaatacccagcagtgggattcctggatcatatggtagttctattttcagttttttgaggaaacttcatgctgttttccatagtggctgtactaatttacattcccaccagcaatgtaagaggaactttagcattttaatcttaaattctttagcaaccagttcataagaggaggaaggatcataaatcaaaaggactgaggatgtcaggcaaacagagaaaacagtccccttccaggggctgggaacggtgtggctcccatcatagtctcagcttttccagttaatgaccgtgaaaccttcccctcaaatcattctaataggcttctgaccctccctcattttctggttcatcagatgaaataataccacctgtcctatctacctacctgcttctggggattggagaaattaatgtaagtgctttatccactgtgaaaccaatttaagtagaaggcacagatgaattaagaaacacttcctgctatgtatgatctttgtccttctcattctctgccttttctgacttgtggcctaaatcataaatgcttcctgataataataatagctgtcaattgttgaacactttctccatgccaggcattgagctaaatgcttcacaggtgttagtttattttatcttcatgataaccttgctcgctggtagtcttattgtttcagtccccacagttgaacctggactctgaatccagcatgctcttctagaaaagctcatgcacttccctttaggctgcattttaaatgaaggagctgcattcatgattttcaattttgacatttaaaaaatgatctaggtcgaacgcagtggctcacacctataatcccagtactttgggaagctgagatgggtggatcattttgaggccaggagttcaagaccagcctggcccacatggtgaaaccccatctctactaaaaaaaaaaaaaaaaaaaaaattagccaggcctggtggtgcgcacttgtaatcccagctacttaggaggttgaggcacgagaatcacttgaacttgggaggtggtggttgtattgagtcaagatcatgtcactgcactccagccttgggcaacagagcaagactctgtctcaaaaaataataataaaataaaaaatgatctaaaagtttattgagtcattttttaatgtttgagtatagcagaaggctagaaatcatagaatgcaattgtggttactgattaagaagagagagataaggcactggagagagagaaagagagagcaggggaaggcgggagaaaggaattcatgaccaagagaaaaagatggcttttttttctgataggaatagtgattttgtaatatgtatttgcatttataattctcatattttccatgcagataatccttaaaagcatataattaattaatgggcttttgatgttcctagtgccagagatgtggaactacattatcttgataatctttgtaaaagattagaagaggcttaaagtgagacagttcccaggattcaaaactctgccaaacagaaacgattaaccttgaggtgggggtggaagaagtgagaggaagtggactgaaaggggtggagttgtgtcaccaactccctcttttagtcagcgtcctggtctttaagcatcaagcctgatttaactttggctgtggtaggtccctgcctaactccaacagtccggagacaagttcaaggccctggtcattgtctgcatctagtgaaaaccctctggttgtttgctcctggttgtgttagataaacaggtaatgattaaacgtattttcactggcagcctttttaaaacaaaacttcatgtttctggagtgtcctctaaagatgaagcattttgcaattcaaaaacgttcccagtccctttccgtttctcagacgccctctgggctgggtgtctgtttggctgggtgcctcctaagagcccctctggtgaatccttcctgggaacctgagcccatccaggaaacacaggacaattttcagtttggtaggaaatcaggtgcttgctgttcaggttgaaaattgaggttaagaaataacacttataaggaagaaacagagtgacttcttgtgcagaatcgattctgtttcagacattggttatccagtgttgtgaattatttagggctttcattttactgctttctttggtggccttgccttttctcatcaaacattctcattgcctctgaaaagcaggccaagtaagagacgtgagttaaaactggagtctgatcattttgctgcttttgagcagctcctggagggcagcgggggagcattttttattcacctttgcacttctcctccccaccaacacttcatactgcatgtagctggggctcactggttctttatagatgaaatccacacagtagttctttataggtgaaatcactatttcactgtgattgcaggagagacatggagaaagggctccagctttgtttgcaaggagggcttccaaggtccgtggaacctgcagagaatgtggctcttcctgtggctttggtgttgccgtgactttcagacatggaggggatgcttgatttgtaacatgctgccgactggatgggccgttctcctgccccgtgacagacacggagtccgccacggtctctgtagcccaggctcaggatagcatctcacttcccaggtctaaactcacctccctcctgcagtcagcctacagaagtgcatctatcttcattgattgatggtccaggcggaaatgacagttctcattgcactggactatgcctcgttgagagctgaggggctaaggaaagccattctctctgccttgccagggagaataaactattgtgaacctcctggaccaaagccatgagcagaataaatacaattcagtcatatagatttggggcaaggcaggcaatgaggctactaaagaaagaacctgtgcccaagaccaagaaaatgggtgaatctgaagccctatgcttgtctatggggctggaggaggaaggaaggcttccactgggttaaaaagaaagttgccacattcttctatgtggttttcagatttttggggctcaggacatctttattctcttaagaataattgaggtgccaaaatattttgtatcagtcaatatatgccgtattagaaattaaaactcagaaatttaaaaaatgatttgtcaatttacttcaaaccatatgcttattatgtgccaacacgcatttttaaaaacaaattttattgtgtatatttgaggtttacaacatgatattataggatatatatagacagtaaaatggttacaatagtaaagcaaattaacatacctagcatctcacagaattacatttcttgtgtatggaaagagcagctaaaaatctaagtgtgactggcttaaaaaagaaaatttacttgttcaacaaaaatccctaatataatacaattttattaactgtagtcctcacggtgtacattagatttctaggcttgttcatcctacatatttgctgttttgtatcctttgacctacatctttccgttttctctcccccaccctttaccgcctactcatggtaatcattgtttcattctctatctctgtgtatttgagctttttaaattccacatataagtgagatcatgcaatatttttctttctttgtctggcttacttcactgtacataatgtcttcttggtccatccatgatgtggcaaatggaaggatctccttttctaaggctgaataatattccatcatgcatatatatatatatgtgtatatatatatatatatatatatatatatatatatatatatatatacacacaccacattttctttattggttcgttcatcagtgggcatttagtttgtatccatatcttggctattgtgaataatgccacagtgaacacgggagtgcagctatctttttgaagtgatgagcttgtctctcttgagtatatgcccagaagagggatcactgggtcctatgatcattccaactttaatttctgtaggactctctgtactgttatccatgactgtaccagtctacattccccccaacattatactaggttttccttttctccctattgttgccaacatttgttgcctcttgtctttttcataaattcttattattgaaaaatatttttcaaaatagtgtcattgttttactttactgcagctctgtttagtgtctgaattaatgggaggtggttggatttcatatctgcttctacattcagtctgttgccatgtcatgtcatgcactttctgaaaaactctactgtgtgtttgagagagaataagagtgaacaagttaaataatgtctcaatatctcagatcccctgtaaaaaggcctcaaggacttgcagggttccctagaccatgctttgagaactgcttccctaggtgcacactccccaaaacttgcctctctctgtgtttaatatgtggccatcttgtatgatgacatttctgcattagcagaaaatgggcatggtgtcccaagcaaataatccttttcatggcttttggcatttgaatagtgcttacgaacattcgggaaagcatccccgagacaagctagaataagattgatgttgaacgtcctattggacaggctggccaagttcttgctcatggactggcaacaggataatccagagcatgagacaggctcctttccctgcttttcagcatctgaatctcaaattgcatgtgctccacttcgtctgcacaacacatacgtttttcctcttcacaattaccaaaggctttgtaagagaggagcagttgctccaaggtctctctgagcttcctgtttccagtacccaagggcagcttaaatctgcttctttactcaccaataactgtgcagtttatccaactcatctgctatttcctgggtgcaaaatcatctcacttaattgtaacctcctttttcctgcattaatcaagacagtggctgagcggtggcattagcgaaataagcatgaatggaaagcagtgatttacaaggattgtgggctagtttcactcagcgccagtctatgcccgctggagagaatgacagtgggtacagccagtgagttctgcggccaaagtgcagatcaaagagaagctattaaaacaaacaaaacacaacacattttgatgttattctaacacaggaatatcatttttaatgtggctagaaaaatattcagctttgttctttgtcctttaggaaaactacctgcatcagtgctctgatctttccagggctggcggaaggatggtgtctgtagattcatttacaatcatggagtgttacagtgaggagagtcagagatcacccagcgcagaggaaagggtgtgggaggagggtgttgggcagggtggtgactatgccaccatagcaaggccctgggtctggtctctctttgtcccctgctaaacctaactgtagcgtgcaagccacacactagggaattagaaagccagcattctctctctgccccctgtgatcttgatggttacttaacctctctggatctcagtttcctcacctgtaaaatgggtatagcaataatcttagtctcatagggctgttttgagaatgaaaaggtagtatacgtataagtttcttaaaatagtgtataatatttaaaaagtacaaaatagatatcagacattattgtaatattattggtgtctctgaaacttggttttctcatctgcaaagtaggattttccaggttggcatgggaattaagttagagaatatatggtcaagtcttggagaaaatgtcaagtaccattaaaagtactgcactatattttgaggacaagtcaagagaacactttaactttgtacctgagtgttttcccacatgtaagactctatgattatctgcaccgttttgaaagcagggcagtaattttaaaataaatgaatatataataaccagggcaagaatagcaatataatcacaactagtaagaacaattgctaatatttgtggagtgtttatctcatgccagcactgagctaagtactcggtatgtaatatacggtctcacttctcaccacagccctttgaaggaggtactattattattccggttttgcagaggaggaaagtgaggtctctcagggcctctcagggtcactcaggttgcacatggctgggccaggactgagcccaggcagtctggttccggagttggtgtccttcaccagtgcagtagcagggctggtggtccagagggaggtggaaagggattacatcccagtttgagttcagcaggttgcaatgttgtgctctgcaggtgacagaattagattttttgtgcttttttggtaaggtaaaagatgtgatacctgttgggtactatggtcgctatttgggtgataggttcactagaagcccaaaccccgcattacccaatatgcctgtatgacaaacctgcacatgttcccccgaatctaaaacttaaaaaaaaaaacaaaacacgcatgatagtttttcattagtatttgggggaaggaagtggttgtttctttaatgagtaaatcattgacttgagatgggagagatcagatgcaagagctttccaagcagcacctgagtaggacagtgtaaggaggggctgggaaagaaatccacgtggagtttctgaagggaacctgagaatgtagaaaagaggtgtagaggctgtaacccaggagaagagccctgggagtgaggcagaactttccagggtgtggagggatgcagtttttctcaggttgactggaggctgtcccatggggcctggatattatttccctgtctctgtccaaggcagtttggtggagcaggatgattctgtggcaggcatcactggctctctctgccaaggctgtacagcttatggtattaagtgggggctcctgggagctttagggtcagagacacctgaattggaatctcagttccgccacttaaaaactgtgtggttgcacaagtactgaattctccaagtcttcataggatgattgtaaagattaaataagaaattgcatgtaaataaatcacttggcacttcgtaagctcccagtaaatagccgtcatcattagcattataattagatcctcccactagctgcttcctggattttccagttgtgttgaggcgctggccctaaaattgtggcttgacccccagctattttagatcattatatatgatgccagtttgaggtgcaggaccccacaggtagaggactggtatggtgctaagcctctcttccttacagatgcattgtttacattcaaggtggtattggccaggattttctgcttgatcttgttctaacacaagccttaaatgaatacgcaagaagggctggacaactgcaaacagccatgcccctggctcagctgatgaaggttgtggctcaccatttcttgatttagtgggttaccacatgttgccaggattcataagaacacttcactgatcatgcatttaaggggacactcgtctttacaccagacaggagagaggtcactcactttgaacaagacccggtcctgtgtctgtgaaatgcagggaccctccccgccaccccagatgcagatcattagctgagcaaggagcccccagaattttgcagcatgactttcactttgtaattgaatggtcaaggcatggatatcattggagcatctctaggggccagattgtctgcccaagggaacagtcctctgtgtatagccaaccagagtccaccgtgtgttacctgactacaagtttggcaggctgatgtcaagcccatactggcatgaaggcaggacaaaggtaggcaggcaggaggcatctgcaaagcaggaatcaggtacccacaaatgctccacagccccggtatgtgatccaagcagtagggttcagggttcagtatcaaagtctctaacaagcattcaccaggagctacagttgtattctggaatgtcagctagggcccagaacagggaaccctttcaagcatggggagaagtgggcagagtttagcagtggagtgtctttgagctgtcctgaaccatacaccagcctgcccacacctgttggctgtaaagtcattgcacacatactgtggcttttcccagcagcgtcttcaaggcagtttcttacaccacatgtgccaggcctgagagtttctgcagttttttcagctgctctaaaccatgatggcatcagcctctcagcccaactctccgccactacctcttttagctcccatttattgagtgtagttgttttccagtcacaatgccagagctccacacacattctccccttcagcccctcaatgaccttgtaagttaggtgttgttattatccccattttacaggcggagaaactgaggtgtagaggggttgagtgtgtgcagtcatatagcgagtatgtggtagagtgaagatgcagatcaggcctgtgtttccccagagcccaagtgctgaaccaccttgtctgtgacgtattcagcccaggcagaaacttactatgactttttcagctgccccttggagtcactgcatcaggctggagcagtggtttgcaaccttgactgcacattgaaatcaactgaggagctttaaaaagtacttatgcctgggtcttgccaccagagattctgatttcaattgatctgaggtgcagcctgggtatttaccagaccagggtttcgccaactttttctgtaaagggcagacaatacatattttaggctttgcagaccatatggtctctgtctcaactactcgactctgccttcgtagagcaaaagcagccatagaagatacataaatgaatgagcatggctgtgttccagcaaaactttatttacaaaaaaaaaaaaccaggtggctgcccaaaattggcccatgagccacagtttgccaatgactgatcaagtcaggcagctcattagtaggttctatcccattgccagtgagattagaattcatcttgcttctctagggctggtatctgtggcatcttgggagagccctgggcaccccataccctccaaaccacgaccttgctgcaggctccacagggttggcccagtttctgtgactgaacttctatgatggcctctattttgccgagggaccccagtgccctgctgagttggaaatccggccatgaaccgccacctgtttggcgggggtcttgtctagcttgctagccctcccccataaggagttaaaattggcccccttggtcttggctggcagccagctcctctgtaattagaaggattagctagactcgcgaggctgccacctgtttgataaagaagactgcccttcatgaacatgcctccccttgctgcctccccccaggcctgtctccctccagaggaagtccccagggaggtccagctgtccccccccaacccccaccttcactcagggtcctgcttccttctctctgcaatggaccttccatagccatgcttgtagcttgagcggcagcatcgttttcacccaagggattcagcacatcagttttcttttatggaatattaatgcagtattcccaaaactgtaagttgtgattatttacagagttgaaagggcaactggaaattatttacaatgtcaaaagggcaactgaatttctctggttattggaattatgctccaacccccgaaaaatatagaaatcagagtatgctttccttatcatccctcacgcggcagctgtccttcttaatagggataccacaaacatattggattgaaggaaaactattgctataggtggcactttagatattaacagttcatatgcacgaagtgccaagttagttgtttagacattggaatgcatttgttcaacaaacatttatggagacctgaatttgttccacatgttgggaataccttcactagagaaagaccttcatagaaacacttaactacaagacggtttcagaggtgctgtaatagaggtacatacagatggctcttgtgggtatgagaggctggagtgaaaggctgaggtgtcagggaactcagggaatggggctccccagtcggaaaacaggaggaaaggcatttttgggttagggaccagtgtgtctaaggcaggagcagggtgtgatgtgggcctggagtgtgtggttcatggggaggggagttgtgcaagttgaatctggaagatggatttggaaaccagtctagaggtcccaacttctgtgggtgatgcagaccaaaagaaagatcttaagtaaaagagaaatgcaatcaagtctgttttagcaaaatgattctagcagcagtgggggtctgaattagggtggtgggtaagaaaagaagcaggggtcctagtaagaggctgttgtcaaaatcaagaggcccctaggtgagaaagtggaagctagaatggatgacaactggaaggtgtgatcacacttaagagacagagttgatgggatgatgaaggccagtgaggaggtgttctttatgatttaaaatagggaaaaggaggccatgcgcggtggctcacgcctgtaatcccagcactttgggaggctgaggcgggtggatcacctgaggtcatgagtttgagaccagcctggccaacatggcgaaaccccgtctctactaaaaatacaaaaattagccgggcgtggtggtgggcgcctgtagtcccagctactcgggaggctgaggcaggagaattgcttgaacccaggaggcagaggttgcagtgagctgagatcacaccactgcactccagcctgggtgacagagcgaggctccgtctcataaataaataaataaataaataaataaataaaaatagggaagaggagcagtgttttagagggacaggaaagttaatggcttgagtttgggggcttgttggttttgggcatctgaggaacttacagttggagttacccattaggctgtgggtaatgtgagacaggaaacctaagagagaggattacaggtaaacaaacctactaagtacaagacactctacaaggcactgggtgtagaagtggttcctaggctttgttacttacagctgaacagagaaggcagatgttcagccataaacttggaacgtgagaacagcctggaaagcctgccaatggtgtgatcatgtgcaagtcgcctaccttcctcagctttgagttcttcattcaaaaaccaatgagtgataggaacacataactaaagtatctgtaggggccaggcatgggggctcatgcctataatcccagcactttgggaggctgaggcaggtggatcacctgaggtcaggagttcaagaccaggcctggccaacatggaaaccccatctctactaaaaatacaaaaattagccgggcatggtggcgcatgcctgtaatctcagctactcaggaggcttacaacttataaacactattatatacattgtatgataaaatacactgacccacctcatatgcttttgaaaattaagcatatgaataagcaatagatttagatgttatgaaactcaaaattcataaaatggtaaatagtgaaaagtctcccttgtgctctgtcctcaatccaccagttcctttctcagagataccattttcttgtgtacccttaaaagggtattttttgcatgtacaagctagcactgtgtgtgcacatattcttcttttttcctcttttttttgttgcagaaatgataacctactattcactattctgtgccttgctttgtttgcatactgaaaattatccatggaaggatacagcaccatttttacttaaggaaccccttatttagggacacttaggttgttttcaatattctgctcttgtaaagagtgctgcctcatttcacacacatgtgagtgtatctataggataaatccctaggattggaattgctgcatcaaggagaatgtgtatttgtaattttgatgcttgttgccaaatttctgtccatagtggctccaagttcccctcctattggcaaggtctcccgtggctatgaggatcacatgaaataatatgtttaaaacaacttcatgagctggaaaatgggtcaacatatccaaaggatccttatccccctctctcccctacacagtagctcttctacctgctgctgggagaagtgatggttacatgtcaggggagacaccgtacagccccgtcaagccattttcccctaagagatatttatcaggggttgttttgacacgggagatgcctccttgtcctcatctccctgaagtacagatggccgtggggctcctgtaacacatctcatgttgtgcctgagtatgcggtgcgtcagaggatgtcagctaacagcttctgctgcctcggcactgggtggtgggaacactcaggactccctcccgcctcctccataaataacatagagacagttgtgttgactcggcagtggcgtgatagaacaggccgggatgggaactatgacctcatctggttttcgacaagcagtgaagatgtagctgataatgcatgtcagctcatttgtccatacaagctgtgttcattgctactggttcttctgtttgtgttgtaaattctgtttcacattggagtttggtattaggtgaaagaaagaatgacagggattcatggttgtctcttattgagatagctcctcagttcagttcaacagattgtgattgacacatctcaatttaactccagaagtttccactgagtgcccactatgtgcagggtacagtgctgaaatgtgtcatgtttttaaatactgcttacagctacagctgttggctgtctacatggactttcgcagactgaaatagctttcctttttccttttgctagtggctcattatatgttacattgacaaactaaattgcaaaccagggatgattcactttgcactatagaagcgttcctgaaaattgtttttgaaaaataattgttataaaataaataatgttttaactgtactggtggatttttctattaaaagcaaattccaatgctgaattattttgaaagataaaacattattttctgatgtatctgttcagtaaaggagaattttttacctaaagggaaaataaatttgatacctttaatcatctgaagcaataccaaatataggctttaaaaaatattttaagagcctgtgagcagtttatactaacaaaaagaacaaatgccatgaagatcacgcgacagagaaagacataatcttatttgctggcaatagctaataacgataaatcttccagtgtaaaaaataggaatcgtgaaagaagcaacagagaaagatgaaaaagattggagaagaagaagaaaatgaaaacagagaaaaggaacaatatcagcaggtggtggatggcccgagtggtagaggaagtgaaagccaaatagcaaaagtggcagcaaagaggacagctggccagtaggagagaaaagagaagccacctctcctggaagctgtgttatctgaccccctcgtgctgcttctgcctgagagtgcgtcgatgtctgacctccactggagtcagtcagtcctgggaataccgtgtattcctgcataacagtaccttagagctttccttacgtgcttacctggtggcaggtgactgttctgagtgctttgtgtattaacttgtttagctgccttagcaaccccttgagaaatcattttccccactagacagaggacgtagctgagcagctcacccaaggccagaagcactgagcggaaaagctaggtttgattcgcagaattctaagatggtctgcccccaagtttcccctcggttggtatacacgatctgtagaatcctctccccttccatgtggacaggactagtaaaaatgatgggatttcactctctttattaggttacattatacagcaaggataaagagatatttgcagataataagtaaggtccctaatcagttgattttgggttaatcaaaagggagacgtccgggatgggcctgacctaaatatgcaagctctttatatttatatttttatttttattgtcatttttattgagatggagtcttgctctgttgcccaggctggactgcagtggcacaatcttggctcaccacaacctccacctcccgagttcaagcaattctccagcctcagcctcccgagtagctgagactaaaggcatgcaccaccatgcctgcctaatttttgtatttttagtagagatggggtttccctatgttagccaagctggtcttgaactcctgacctcgtgatccgcctgcctctgcctcccaaaatgttgggattacaggcaggagccaccgttcccagccaagctcttttttttttttttttttttttttttttttgagacacagtctcactctggagtggctcactgcaacctctgcctcccaggttcaagcgattctcctgtctcagcctccctccctgtctgtagctgggactacagacatgcgtcaccacgcctagctaatttttgtatttttacttattttatttttattttttgagacggagtctggctctgtcccaggctgaagtgcagtggtgcgatctcccctcactacaacctccaccttctgggttcaagcgattctcctgcctcagcctcccaagtagctgggattacaggtgtgcaccaccatgcttggataatttttgttttttagtagagatggggtttcaccacgttggccaggctggtctcaaactcctaacctcaggtgatctgcctgcctcgacctcccaaagtgctgggattacaggcatgagccaccacatttggcctaggcaagctctttaaaagaggctccaggttttccctaaagaaagataattgaagctccagattcttctgctgaccctgaagaaccaaacagcctgttgtgaacagcctatgggaaggggccacgtggccagaacctgagaataggcttaaggttgctcagagtggtccctggccaacaactagcaaggaaatggggacctcagtcatcagtctcagcgaagtgaattctgctaacaaccacatgagttgagaggagaatcctgagctcaagaaaggaacacggtctagctgactccatgatttcaacctgggaaacctggagcagaggacccagccaagccacacctggacttctgacccacagcaactgtgagctagtgagtgggtgtcgttttaagctgctaagtttgtgttaatttgttctgtagcaataacagatgaatgcacaaggatctgaacctcgtgattctggctgcagagctcacatgcatcctcccttctccaggcagcctcttcagagacgtcatctcaaaaatcactaaatcctggaacttcagggttgaatggggaactttgatctagcccagttgtttaatcaaacttttcctttgcagcagatggccactgtgcaagcagactgggggagctgctctacttgctgtggggtgtgtgagccgcttctgttctttgcactcctctccttgaggaatctctggggaacacagtttgagaaccactgatctgatccaacaactcatctttacatttccctctacaacatcctgacaccttgttcctttggaaagtcttctgtggcattgaaatctggctcaccgtaattcccactattggtccaggtccagtcataggtgatacacagagcaaatggaactctttttccataggagaatgcatcactcattaaagacagttctcacgtttcatggaagccttctattttccagacaaaacatctccatgaccacaaaggagctgccagtcccttctctcctagtgtttgcctgtgtttctcttagagtcaggtcaggaactaagcacaaaatttttggtgtggtctgcttcacataaaatacggcaagcctagcataagccacagtctaaatattctgtttccatgaatgcagcgttagaccacatttgctttttcgcaaccacaatgcagtgctgactcataccacacgcagagtcaatcaaaattcccttttcacatatgtggttgctagggtatgtcttcaccaacatgtacttaggtgtgtttattttaacctgaatacaggcttcacattcatcaccattgtgtctcatcagggatctggtgcatatcttggatgatcctgattatgtcatccaacaatattgctcttctccctagcatcacctcaactctcaattggacaaatatgccataaatatcctcatcggagttattgacagaattttggaaccagacagggctgaggtcagagccctctagcaccatattgatgactattcccagtgtttgggtccttcaaaaacttacaaatccaactaattgtatcatctaatggcagtgatccaactcataaaggtaccaccagaaacataatgaactatttcctggccgccaagtacaggcattaagtccatttctctgccttcccaagccaggaggtcactagagctcctcctgcatgcccacaaacatgtaggagcctcttttcgaggatgtgcctcatacccacccttttatagtttgctcctccttagataaacaccattcccccccgccccccatgattccattctctctcatcttttttttttttccccttactcagattcccttgggaaaaggtaaagactacttagaggataccagtgaaccttggagtacctaaatgactgtggcaggcctcatctttatttcagaggaggaatctttttggggtatcttatcataagaaatagggtagggctccagtgtaaaagtcaggacaagttgcataggtgggaggggtgcagggaaaggtggggtctgcatgtggggatggggtggggagggagatgaagggacaaggctgtgtttacctctgaggtttccgtggggcaggggcgaagccagcgtcttctgcagccttaccctttcttcctctcatttcaccatttctctaccagccacaccttatattaaaacagagggtaaggggaaaaataagacttgctttgtaaagtggggtcattgttcttgacagcactgctccatgtggcatcttgggatggatgagttcccagatccaccctaaagtggagatgctgtgattccacaattcctttagagagaccataaagcccatatgagtgggcttggtggagatagtctgcgattataaatatatcacaagcctgtcttggtttattttttcatatacctttctcctttattcacattcatttatataaacgtgaaagttgccatgggtcttataggatacctatgctacctgaagaccaagagcttctgtttgatcattgaaaaagaagtgttttagttgtggttaaatttgacagtgcagcattcacctagtattcatttaccatctctaataactatctcccttcccctggggatggggacccttttcttctcctgtatttttagtccatttgtttctggtggagtcccctctatgctctactttatacgggtatgcagcttaggtctggccaatcagaaccttatattctcccttgtttgattcaaggcaccaagagggcagagagacttttgctgagtctcctggcaaaaatacgcttggtcttcttcactgaacttttcaggttttgaggctcaagccatctgagccaccttgcccccaggaagtggggatctgaaagaggatggcactaacacagagaaagtggagatgggagatggaggcaaactgaactctgggggcatgagggggaagtgactacattctagactcagccagatttcttgggtttgaattgttctgccacttacaaatgtggtcactctatccagattggtctctgtgcctcagtttactcatttgtgaagtgggaattgttatgatacctactcatggagtcttagtgagggtcaggtgagtcatgtgaaatgctgagaacagcacccagcatttggtatgtactatacaagtgttagtcatcatttgagccctatgccaagacatgactaaaatgagacccaccccttgatttttttcagctcaaagaacaataaattttcttttgctgatagtccgtttgggttgtgtttgttgtcacttaacccaaagagtcctaactagtagactcagtgaaatcaaattcatattcaggtttaaattttgtcttccttaatgaccctaagatagaaataatccaaacttagatattcctttcttgattattgtccagcaatgagcaaggtcttggaactggctaatttccttcttcttcctatcttcttgcttgcatttgtttgcaatttggtcttcagcatgtctttaaaaaatactgcatgtcacaattatttaaggaacctcagaacactgcaattagattttcataacaagcatatactttatgtcctttatttccaattcatgcagtatttaaaatgacaatatgaaaaaataaactatgaaaaattaaaataaatatattagtatattagacataaataaaaatttaaaaacacactgaatggggaaggtgggtagttggctggagctgtgtgtgggaatagggagcaaataagaaaacctgggaatctccattgggttcagcaactgcttggctgtgtggccttggacaagtcaattctcgctggtttcccagtctgtaaaacaggcaggatgtgatagctgaggttccttccttattaattttgaagtgtgtaagagctttcttaagcatcttaaataacatgtttaattttctctgtggttgtgaaatgatgcaaaagaaattagaaaaatgtagctgttaatgagactcatctgcgttttgtgattccttagaatttgtggtgtatattttagggttactcccatctcttttctttctatatccaaagggatttgtttactctttttttccccccattttcttctgtctcaaaaatccatgtggtcttcctgagtcctcactgtcttaataatcaaggggcttggccatttcagctgagaatagcagcagtggctctagtcagctttaattagcagggagcacacagagaggaacaataaggaaccagaattgaaaacaaatagtaaactagagacaatggagacaaagaaatggagacaaagcaaataagtagaaccagttcagagggctgggaagacagaagccacaacagtgttagtcttcctttttcttagaatggaaagccaggccaggcatgtagtgggcactcaggggatttgcaggagtgagaggggcaagggagaaatagatgagattgagcatttggctgtgtgtggacacgcttcatcgtgccaactcaactagccctgggatgccggaggaagaaaatcacaaaaggaaacttaggatgcccaggttccagcacaaaatgcacttcccactgccgaggtgaaactatctgaggcattgaatgaggaacaatacaatttttgagaaagctaaggaggtgcctaccaacccgcaccaacgcatttgtttttgagaaacgtggtgcttatttgcaagtaagtattcatttcatgcctcgctatttggcttgtaggttggacttaattaaaaaagctgtagcatctttgagtccaatttcctcttttcacatagcatctgtccctgacagcttgtgtgaggctcggccacttgttgaggctgaggctagaggaggaaatgacaagggagaggcaagatggacatacgcctcttgttggaggtggcactctctaattctgcatggccccgtcacgtgcttgggaggcttcttggtttaagcaaggcaacagatgtctccgagagggggatgctggcagcatcccaaaggccagcaggactacgggttaggcatgagtaagccgacgggagagggaggcacacatgctttgccctctgctcagaactggaaaacaggcgaacattggataagagcaaattctagaactgaacagagggtgatggcggaaagaaaatacttctttggaacaagcattatcctgcggggtggaggtagatgtgggggatggggaacttgactattttcaaagacaaatatgccccagcacttcctacattgaaatagatggcacaaaagataaaagtcaatagggtgttgactttgcctatcaacgccgcactgttttgctttgcaaagcatggctacttacatatgcatttacccggaggtttgactttaaatgttaccaaaaaagagaactgaagctttctccccttacagctgtcattcttagttatcaggacaagcctatcagtaaatccaaaccaacctgtatctcattttgaaacaagtaattgagtttgtggtaagtaagctcttacagatggagcatgcacttaatctactttgcatttgaaggttttagtgttgcttttaaagcagtttgtttgaagttcaaggtattagaatttggatctttagggacttcactcttaatttaaaggaatctttgtaaattgcttgggccttgttcctgaaattacctggcatttccctaactgcactgttttaaagcacaaggaccgtttgaccaaacatgctgcattcacgttctttttctgggcctttgctcttggcctctgcatacctttattccctaacaacagatgttctggctatattttgtctctgaacagtcccttttgcttttatgcaaaggaacccagcactgtggcacatcccacctgaagcttgtgtttatcgctctgttccttgtggttctgtggatagcgaatctctgctgctgttcccatttctttccatttgatatctgaagaatatagtcagcctgattgctgagcagactgtcagagattcatggaagaagaccatctctgggccatcttacggcttagattcacacacagccacatatctagaaagccagcaaggtcaggagcaataggggttttgtttggccaggcagtattcccgtgagacttgtgtgccaccatgaataacgtttagtaagttttactggtactttgcgaattacacaagtaataagatgatatttatggacaaattagaacaaagtatagataagcaaaatggatgacctgcctgcaaattctacatttagaagtgttaatggtggcaaatccattcgggtctgcagcaacttcagttcttgcctcctcagaagaaaaaattcaaccaaggggcataaggcacagtgagagaccaatgcaagttttagagcgagagtgaaaatttattaaaaaaatttagaacaggaacaaaaggaagtaaaggacactcagaggagagccaagcaggcaacttgagagattcaagcgtgtggttagacctttgacttggggtttatatgttggcatgctttccgagggttgcatctcttcttcccttattcttccctgggggtgggttgtttgcatgcacagtgtcccgccagcacttgggaggggccacaggtgcagtgtgtttactggagttgtacccatgctcacttgaggtgcttttcccttaccagcggagtgtttctagaggaaggtcatataccagttaaatgccaccattttgcctcttagtgcgcatgcttgggcccactcacccaacttctaagatcttactgagaagcagctgatcaccagtttcaggtgttttctatctattgggagccagccgttccctggcaccagctgcaaccaattattatttaagagacagattaacaactgcctgaccatcacctgatggtctcctgacattcccggttggtggtggaggggtgctctcctgccctgcttgtgtctgcctgactccctactgtaacaaaggtaatgcttctaattgccttttatgtacatatatacatgtaaatatgtattttctttttaaatgtggtcagactgttcccattaaatttcaaaatctaccatggacatatttcatatctttaagtatttgacattattttaatggctatgcatagttcagttgcatggatggaactttcttttttttaaccagtcaactattgttacgtatttaggttgataccagtttttctttctaataaaccatgctgcaatgaacattcttgtggctaaagctttgcacatccttaatgttttttttaagtattaaatcctagaagttgaattgtttgatcaaaaactgccacgattcttacatgaatctatcctgtataccctttaggatggcacagagtatctgtgtagcaaaagttagcaccgaatgttttccacactaaacctgagatagggaaagagcaggaaggacttttgccctttactctcggaagttttgtttgtattactgcctgctataaatacaaagagaaggacttggctcctcctatattttggctgttgcaagccctaaatatttaattcaatatgtttaaagtaggccttatgaactaccggggcggaggattttatgacacttttaccatgatgtgcaaatttgtatatccacactttatctgtaggagtatctacatacatttagttatgggaggcagaggatggagcgagagacgggccagcacccttaattcttctctgtgttgaacagagatgcatgtttttgatatgctgaggagcattactataaaatgcagactaatagtatttcactggagaatagaaaatacttagggaagctggagtgctccgagacaacctttcaatccatttaccaaaagagcttataatggaactcaggtttcaagggaggtcaaacactaataaatattgagaaaaaatagttaaaaggacatcaagttaatattttacaatctattctttgatcttggaaggcttgaaatatttttctacactacttctgtgatttattgattcacccctgccaattggcatattggaacagacacagatgccttgcttttaactacagcttccgcttctataatgctttgcaatgccaacagatttttatgtattcactggcatcacttattgatactgccacagttctggaatatttgctagttaaaaactggatcgttgtcagtaaaagcgactgaaatgttattgatttttgtttcaatgctgtaataacatctcttggttttgttgtattggtttggggggaaaagtaaaacaccctgcatttcattgactcttccacctttatctgtattcaaaatatgttcagaatctgattatttttctacttttgttgtcaccaccctagtcttggggaagaaaatatatctgtcacggattacaataacctcttaactggctgtttccactcttgcctctcttcagtctattctgaacccagaagcccgagagagcttccaaaatgtaagtcagatgatgtcactcctccgtctttgcactcagagccagcctctgcatgctgagcctcatcttcctcacctgccacatgccccactccccgcttccattgcaaagacagagctgtcaggagagagtctggattggcagcactcgtttgcagctaccaatctcaaggcccagatgctctgccttccctgctgtttctgaaggtgattgtccctgctgctgcctaagggccccattcactggtccattaaatccttttccctcccaccttgtccccttggccctgctgacaatggccccttctccctcctgcatcctcgattttcccctgaattaaggactgtcgggctttgacccatcactctacctacacccttcttctgagggcagctaatgcccccccccccccccatattaactccaaggtccactctcagtccttgccttatttggcttttcagccacgcttgcgaatgttgatcacttcctccaccttgaaggtgctcctctggcttccacaaactgcactatcatccctcagacttctggtcactgttacttctctgtctttacatcacgctcctctctccttccctcactcagctccagacacacaggcctccttgcagttcccgcaaacaggtaggctgtgtttcagggcctccgaacttgctgtgcctcctgcttcgaatgtgctcttcctagctgtccgcatggctctccgtccctctgtccattcaagcacgtacttgaaaggcacaggtgctacctgcgctcctttcccacactgtttccccctagcacatctcattgtctcgctcactatgtgttttatgtatgtatttcatttattgtcagtctctgtgcatataagctccacgaggctgggaatttttttttttttttttttttttttttgagacggagtctcgctgtgtcgcccaggctggactgcagcggcgcgatctcggctcactgcaagctccgcctcccgggttcacgccattctcctgcctcagcctcccgagtagctgggactacaggcgcccgccaccacgcccagctaattttttgtgtttttagtagagacggggtttcaccgtgttagcgaggatggtctcgatctcctgacctcgtgatctgcccgcctcggcctcccaaagtgctgggattacaggtgtgagccacggcgcccggcctgagggtgggaatttttatctgttgtgttctctgttgtatctccggcacctggaacagtgcctagtatgtgatgggtgcataataaatattagttgaatgaatgaatgaatattcacgagactgctagtagggtacttggagaaatacttttgggagtctttgtacagggatttaaaagatttataattttcttacagttacatgatttgggaaaaacaggggtgtttggggacaaaaacaacaaatatttggaaggtggcatgcctttcttattttgccagcctttctgtatccacagaaacactttctcaaaactgtaaattgggcatatgtccttcgtgcctgccttgtaaccgcaagaagataccatttttgtgccgcgttgaaagacaaggacagaaacagagagaagcagctgagatcttaagtcagcacgtttgattcagaggcattataagtgtagacctgagagactctgctcaaaatgcagcaaatccctgctttctgtctttgaggcctactgtacaggtagaaatgtcacaggtcaccactttattttccccacacgtgtcagcacattgagtgcacacagcaccatcccctccctgcctgttctcacgtatgtttttgtcttcaaaaattccttctctatttatgcttgctgaaattccattcccttcaaggcccagcaaaaatgcagacttgtgtgtgaagccttcccagacccttgcagtcctcatggatcccgctgtgtgctatgctctttagaacaagcaagccacagggcagtcatcctctgtatctttgcaggattggttccctggaccccccacagataccaagatccatggatgctcaagtctcttatataaaatagcatagtatttgcatattacctacacacattttcccataaactgtaaatcatctctagactacttataatatcaaatacaatgtaaatgctatgtaaatagttgttactctgtattgtttagggaataatgacaaagaaaaagtctgtacatgttcagtacagatggaaccatccatttttttcaaatatttttgatttgtggttggttgaatccacagatgtggaacccagggatacgaagggccgactatatccctcagtttagctgtgaacacacacacacacacacacacacacacacacagattataaacccattgagggcaagattatatcatacttttttggtattttcagcacctagaaaatgccttggacactaaaggcactcagaattgtaatgaaatggaaacaacccctttaaaaaaaaaaatcagggccaggcatggtggctcacgcctgtgatctcagcactttgggaggccaaggcaagtggatcacttaagcccaggagttcaagcccacccatctatttaaaaaaaaaaaaaattaaaaaagatgagagagttaaaactgtgaggaaatcgctttatggttattgaggtgttttctaccaatgttttcatctggtagcatggtcaaatcccagtgagacttgtctgttgagcctacttacttcttttcataatatttgttagtaagagcaggcaagtgcttttgggggctctaagtgagcccctgataagcaagtttttgactaatgcagatctggcctctgtggcattactgcctttgccagcagaggggattaggcaaattggcaaagggtcttgagccagcagggtcttgtgggaggtttcactgatgcctgagatgttgggcattgggtcccagaggaaggagagttggtgcaatcttggcagctgagctgtctgtgggcaccacaggcttgtccatgttgaataaatatgtgttgtagctgcgaagccctaggccaggattactctaaaaagagaaaggtctgtccgtgtgtaatcaccatttttttttttttttttaagacagagtctcgctctgtcgcccaggctggagtgcagtggcgtgatctctgctcactgcaacctccacctcccaggttcaagaaattctcctgcctcagcctcccaagtagctgggattacaggcgcccaccaccacgcccagctaattttgtgtatttttagtagagatggggtttcgccatgttgaccaggctggtctcgaactcctaacctcaggtgatccacctgccttggcctcccaaagtgctgggattacaggtgtgagccaccatgcccagccgtaatcaccttttaaaaattctagctatatctaatgtgttttattgaagcatatgctaaaatgctgtatttgtaaggattctcaatgatactgggtaaatgacttgtagtttctgagtgctgtggagtaaaacaatagagagatgtcagatactccagagaagaggaagggtaccttcaagagagcatttccctaacagactcagttagcttcatttgcctaacaaacagactcagttagctttggccttgaaggtatttgcatgttatagggcagggtttcctttcattgaatactttttaaaagtgcttctttctcatagcttatgtgtactccattgaaaaaatgagggacagaagagataaagtgctctaaatctatttagcagtcctcaagggcataactacagccagatgtttaatgaacttactatgaattgtcttgcagaggtacagagtgacttcttaggggtaaacactttgcctgtaacctgaattcatgcacaaacttacctctatgacaggatcctggctggaggggagatttgcatttgggagctgggcaggtccaggaggatgctctgttaatggctcctctggattaagaaggggatctgtcctaacgttgtaggacattcttcttagttcaggtaaagacagggttcttgttacaagaccatgaaatattaggctcaaagacactttgaagagtgagaaaaatggaatttattgggtgaaaaggaaaaaaaggggaaacagggaccctcagcggagcaagactcctgctagtcggtttcccaccttacagattgaatcccaggttccaccctggaacaggaggggccaggctcctcgcccctgcaaagggcactaaattctgtggcctcaccccccattctcctagtgttctggggacccctttacacctggctgtctcattctccgctctgaagaagtccatctgactgcagttagaaaggataaggatgaagacccatcttagcctcctgctgacagggggcgctgttttggggaaacggcagtcagagctccctcaaagaccgatctgaggatccccggaagaaggggccatcagctgaggctctggttgcgtgatcatttggagtttgatggcctgaagttgagaagagacaaaccaggttattagaaaacatgtattaaaacgaaacaaggtggggggagggtaaggacagctcaaaaatcccgaggccttttagtagtttgcacagagagagggcggccaaaagcccggctggtacaaaaacgttacccttttgccagcatgttgggcttctgggttccctccccaccgagcccagtcctaagccaactagtttaaggcttgggaaattaacctttcccagtttggaggatgcacccgaggggaatgacccattaaacagagacacgattacctatctgtgaaaagaggacaggggaggagagaggaaaaaagaaggcgttttttaaaggagtcccaggggttcaggatgcatttgaaaggggtacagactgaagatgaatggctacccgtctagaaagaggagagcaggagtccctagttcccttctttgctatcaaatacctggggttcgtgagggagagaaggaagagcatcttccttgcatccccgaggccttggtgacttcggcaggcaccacccacgggtgccaaagcggctttcacctatgaagcagggcggcctaaagcataagaattatttgctctcacttatgtttctatccccactactgttagtagccttggagttccccagacctcatttatgccatagatagtagcaccacccttatttatgaaacaagaggcttggcttcatcagcaggaattagccatgctcacttgtgctctgttaacctaggttactgtttgcctttggatttcttagctccagtttcccccgtcccccctcccccgcgaccagggctttgacccgaagcttggaattaagtttgggacaaaaatgtgtttcgggggggttgcatggactccttataagccgaatgctaaggtgaagctgtggaacttagtccttctccaacaagggatagaaaaggatgtcttgtgacatgcccaggtaactggtggctacagtaatgcttgctgagatttgggtgcacggtgcttggctttggttagctcccttgctttcattttcccaaaaaggaaacctccgagtaatgggcatcctatttatccccatcacctggcaggattagcaggagaattgcttagaactagaatatcgatccaggtttttaaatgcctcatcccttttgttccttctgagctgcagctggagattgctggttggtttacaagaacaagcaggttagtttaaaaatgtaggcaaaaacttaaaaactactaatgagtttagaatttaatgacaaatgtatgataagttttgaaacataatttctctctttctccagtcctcatttttgttaaaaaaaaaattatgataggactaagttgtttgcaaaatagactttagttttatactgggcctgattatttgcataaagtgcagcaaggataactatttttaccaaggcctcttattttttctcagatactttgaagggtgagcaaaattgaatttattgggaaaaaaggggaagcagggattctccgcagagcgagagtcctgctagctggcttcctgcctcacagattgaatcccaggttccaccctggaacagaagaggccaggctccccaccactgcaaaaggaccaaacatcctatggttccaccccgtgctcccactgcgtagaccggtcggagtttctccggggacccctttctacttggctgtcttactaaggaacataaccagtactgatccgtggtgatttctgttgtcataagataatgtactgtctggtttcattgaaatcttgtttatcatgtgtgttcatcatggggcacctaaatcaacacattcctgaccccataggcagtgctgtctgggagaccttaacaaaggatttgcagtcaggttgagtttcattttggggagtgttttctgttctagtactttcagaaatttttgctcactgtatccagcaacaccgcctctgctgcttgctagctctttgcttcattgtgctcatacatcaaataaggatggggatgtcacctttgtcaggggtcttgagataatagataatagttctggaaagcacaacatggatgtaatgtattattattattaatgcacatgactcaaaactctaacttataagagtaatgcaattatgaaatgaggttactaatattgcttgttgtcccataattcctgtatttccattgagcttctattaagtagaaggcatggaatactgagctagaaacacaaataactgatgatgtagaaagcattttaagaaacaagtagacaactgtccatgagagtgcagataaaagcataagttcccgagaaggagaatcagggaagacctggaggatgaagcaacttggggatgggccatgggcatggggaaatgggattccaaacagagaaaataacatagagtaaaaaactggaggcaggaacccagaggggcccagagtactgagtgcaaattagactgggaagaaagatgggagcacggactggagccgtgggatgtttttccctttgcagtggggaggagcctggcctcttctgttccggggtggaacctgggattcaatctgtgaggcaggaagccagctagcaggagctgccagattatggaacgtcttacatgtcaagctaaggaatgtggaatttctagcagaagcaatggtaagcagagtgtaggatgagggaaccagatgcaatagaccaaatgaggtgttgaagccttcagggcatttcagaaaaaataggaggtgagggtgaggcaagaaagaccctgaaagaagagacaggacttggccattagtgacatatgagaaacaaaagtgagctagggagaggagggtggggcaagggtcaggtagttcattagggcaggaatgccttcctgggcctttgacactggcttctgaatggacaatcttgggaaaacattgcccttttatatttcttcccaattttgagtgatgctattttctacttctaattgtgctcaaaatagccagagatgcagcgtaatacttggagtcaacaaaatgatatggtgggtcaaatttgtaaagctaaaaaaaagtagtgattcagtgttcagacttgaaaagtttccttgtttcaaaaaacaccaaaacatgaaattctgaattaatgaagcagataaattagcaggtgattatttgaataacaaaagaaatattttccaaaagccccttttttcaggaattctttaagcagcaagtatgcctagtcttcacccccatttaaaatgtgatttatttgtaggcatttgatgaaacacaggaaaggaatgagcttatctcgtaaaacatgatattccttagagctacatgttaccatgtgcaatattttttaaatgtgtttattcttatatgtatgaaataaccataagatgaaaattctcagaaattgaatgagtatctttccattttcttttagttaattttgagaattaaagctgtaatgttttattaaacatataaatgacaagtttaaaatttgtcaattgttttgaatactgtcatttgtatagtcccctaataaacacagagtccagaaagtcctttgtcattttttcttaaaaagcttgtgataagaaaagcttttataatgtcagctcaggaaaccctaacaatagcttccctcatgcatccttaaatgaggtaaatttaattattttatgtttttctagcagttcctactttcttctatagaatgcttttaaaaattactctttgccacccaaagtatttgaaagcagggcctcaaacaggtacacacacacacacacacacacacacacacacacacacacacacacagttttttggattcatctggaatctaagtgcagcaccaggtagactgctttgccctaaaagaggatcccagatgctcctggcctttctgttgtgtcctgaacgctggatgatccaagcccactcaggatgcctcttatccttttctgaagggagaacctgctacattgtagagagttggagatctggactccaggcacttgggctgaagtctttgttcatgctcttgcttggctgggcgaccttagcaagtttcttaacatctctctgcctcatctcatctcatctatggcatatgaattatactactcaccctacgtaatcttaaaaaattgcactaaaatgagagcactctttgagttttaacacattgtacagaaggaagtgcttgttatcatggtggtagatttcctccccctttctcttcaaataggtccatgtttgagttttttggtctaggaaaaaaatttacagaaatcccgacttaaacatatatttccactatcttcatcgaagccatctgcagccctagctagactgaagctggccactttggggataggaggcaaaacaccatcctgtctacctgtggcactgaaatttgtgagatgcacttccccttgaggaacatgggcaaagccagaggagccctaaggcaggacctaatgtcacaggctggagaattccaaggataaggaccctcagccttttgcattgacccgtggctgtctctctctaacagagtgatctctagagctacagtttagcgagcgtgattttaaaaattgtggtcaaatatacataacataaatgttatcattttagctgccgccaccgctgctgctgcagctacttctgcttcttctgctgctgcttctccctcttcttcctcctcttcttcttcctcctcttcttccttcttctccttccttccttctttcttcgtatttcttctttcttcttccagagtctcactgtgttgcccagcctggagtgcagtgatttcagtttactgcagctgcaaactcctgagctcaagcgatcctcccacatcagcctcctgagtagctaggagtacaggcatgtgccatcacacccagctaaattttaattcttttttttttttttttttttttaagagatagggtctcactatattacccaggctggtctcaaactcttgggctcaagcgatcctctgaaagtgctgggattacagatgtaagccactgtgtctagccccattttaaccatttttaagtgtacagtttgatgtccattcacagtgttatgtggccatcaccaccatccagctccagagccttttcatcttcccaaactgaaactctgtaccgattaaacaataactctctattctcctcccctctccagaacctggcagccaccattctactttctgtatttgaactgactactccacatacctcatataagtagaatcatatgcttttcttgcttggcttatttcatttggcatatgtcttcagagtttagcatgttgtagcacaagtcagaatttcattcctctttcaagctaagtactgttccattatacacacgtatacacatgtgattaaatagtattcagcttagagtgacagatcccggtcccgcccatcttccaggtccatctaggttccaggggtctgactcagtacctcacatcaggggcaacaggctgtctatgccttgccattgtgcgttgatgctggcgtctgtttccctgtccccagtcattcatccccctagtcattgccgtgctggcccacgttccccacagcaagacagcttaaagtctggctctctctaagttattttcatgatacgcttgatgcatatggatcatccttctttccagaaggaaacttggcaggctgcataagccttattcccattgatgcgccgcctttggggcctgcgggaatcattcacctgttcttgtgatgtgctggggcactaggacccacctgggttgtctcagtcattggcgcaggcacaccaagcagacgtatccaccctgacacctccctgtcctccccgcctctaccagcacaggcaagtgccatgcccccttccctcttatttcccagttccacctgggaggttattattcactcctctcaggatctgcctggaggtgggtggagtttagggcccttccgtagggactccccggtgtctaatacccttccaccacctccatccattcactagcttcccccagcctataggactttcttcagagccttggatcacttaacacctatccttccaaatcatgccagggctcaagacttcgaagcagaagataatccatttcttagttttctgctttgtgtttctttccttctttctgaagtcatgaaagcaggccgggcatggtggctcacgcttgtaatcccagcactttggaaggctgaggctggcagatcacctgaggtcaggagtttgaggccagcctggccaacgtggtgaaaccccatctctactaaaaatgcaaacattagccaggtgtggtggcatgcgcctgtaatctcagctactcgagaggctgaggcacgagaatggcttgaacccaggaggcggagattgcagtgagccgagatcgtgccactgcactccagcctgggtgacagagtgagacatcatctcaagaaaaaaaaaaaaagtagcaaaagcagtgtctttggctgattgaataggtcagggtcactgggtagagggacaaaatgaaaaacacacaaaaagccactggagttagtacttaaaaatatcctaattcgaatgtttcaaccccacggtttagtagaagtacaagaagtgtagaggacataaattagaggcagaacagagccaacccaatttgcagattgctgaagcctaatccttggcatccccaggagatttatatggtgcgagacgtagctgagagttaagaaaccaaaaatgactgaaggagcaaataaacatattcagagaggcttagccaaattgtaattgtagagagagatgatacctcataactaaacaccatgaaacaatgtaaaatgtaatcaagtgaaccataactgtcctaatgaatctgctttggaactctagcatttcatattttaggataaaatggagtattcttatataacactatgttaaatggaactattttaatccaggttttgcctgggtacccaatacattaaatgtgccatttaagaatttggtccaagaccccctttcaggagtacaaagatttgcacacgaactggttttgtgactcttaagccctcgcccatgtagaatattggagcaaactgtgtgctatgttctaaatctcgccctctccagaaaggaagatatagggggaggccagcctcttgccccaggcccagagagagaggcttcagctggacctcttgaatggtttaaataagtgtcgtctgcattttgaaggacacaatagactgggacctgactcactctgaaaaatctaaagggcaggttgctctgagattgtggccttaggggatgactgagtatctagaaattgtcagggcggaggatacgtctgtttcccgtgaaccagatgtgagccaggccccaaggtcagttggcatgggttcaacttagatcctgtcctggagagctacttggaggggaaagggacactgaagggagggtgagcctccagatttccagtggccaaggaaggagctctaaacagccagcgtttgcctgcacagaggatacgacaggcaggccaggaaattcccagtgattgttgccggggaaaggggtgtttttctgaggaccccatgaatcattccagagaaagaagagtgtttataaggtttcaaagaggtataaaagatccttatccaacaatgtttttttaaagctcttactatgtcaggcaaccccattacgtatgaataaaagaaatggcatggagaaaacatccctttacctgctgtccatattctacatgctctaaatcataaaatattcagcacccaacattctaacagggatagtctcttctatgataaagatcagtttttttttttagttttgatacttatcgttatttattacaaagcttgtgatttggaagaaaatttgcatttgttaattcttaagcatgataaaatggaaagttgggtcaatagctggataatttttagagactagtaatcaaagcaattgtagagttagctatttgattggcattgcgcagaatgaaaagcctgataaagtttacttgtgtagaaagccacactggctgcccagaagctaactctttgggcccaaattttactcttctgaaaaagaatgtgcatctatttcatatgtaaatctttcttccctctcctcccttctcctcccctccatcctcccgttccttcctcctcgtctttctcctcctcctcctcctccttttcctttctctctttctcccctctttctacccctccaaccccttcctctttccctctccttttccccatccaaacttagacacatgcttacttgaatctttattactatattagatttctgtgtttcatatctagaatgctcacttctagctctgctggaatggtatagctaaaggagaagcagtgaagattgtgggccaaatgcacaatcgttgtcagacaagtatctcaggatgttcccaataccataattttactttctgtcccgtcataagttagggcctatttaggatttgttatggaagctggtatgtgattattcattgatttactcaatagcgcactgtgtaagtcaataaatctttggtccctaaactggtggtgtcttaagaagcagacttgaaagcattctattgccttatcagtttcctgggaggatatctgaagattaaaaactgcagtcaaggtaagcatttgctaggaagttaattattggtatctctgaaaatggaggtactggcatcatgcaaaagaaaggaggaacgcactgattgagttgcttgtttaataaataatagaggattcacaaagcagcaaatgtagaagagatgtgatgggaaggcaaaattcctttgtgaggtgtcacttaagagagtgctgattggtcagaagatgagtataaactgagaggaggggctgtggcaggaaagggggaccctgggtgttaaagcccaaggcgatagagcacatgctgaatgaactgttatatccttgccctgtgacacattcatccccaggaacaaatgtccagggaatcttgtgttcaaggtgatttttcaagtgtattgtttattatttaaatgtagcaaatcacttaatccagtgtaatcagtatgtaagaattgccgtgaactccctcctgtcccagtagctttgttagcatccttgagggctgacagcaaacttaatcaggccagcttgagtggaatggctttgggtgatttgcattctgcagaattgccagattcctgtcctctaacacaataatgagtgtttccatccagtggtgtgaagcatgtggaataattagctctcagcgttaaagatgtgactagtaacgtccaagcctccttcctcttaagagtatgattttcttatggtgacattttcaagaggacatccgtaatctctcattttggggacagcaggaaagagatgtgcctggatatatcctatcagtgttcgctgattcgccttcagctaaatcatttaaccagaccaagggaactgagatttgagaagctcagttgtctgtaaatctaatggttcccaacttacaatcacttcagatgttttgaggggtctgcagcctcttttatacatttttaaaagcctaataaaaaagctaatggaataattatctatcagtaactacataataagttcagtttgttttggagatcagatctttcaaatcatccagtttgaagggaaagaataaaaggagtctatgagttacaaggttggtgagtatgattagtcaacatcaatttacaagtaatggtattcctactgtggtgaaccgaataatggtccctgcaaacatgtctctgttctaatgtctggaccctgtgaatatgttgttacatgtcaagtgggaattaagatttcagatgaagtaagattgctaaccaggtgaccttgattgagatgggcaaattaccctggattatccgagtgggccaagtgtaatcacaagagcccatttaaggcaaagtagagtgtgagagtcagagagtcattgaaggatgctctgctgctgggttttgaaaaagagaggaagggaccaggagtcaaggaaggtggacaaaatagattcttccttagcgtctccacccagctgttgaatttgcctcctgggcacacaggaagtctgcatgcccagcccttcacatccaattggggccatgtggaatgtggcccaggtgatgttgctcagaaagaacccagcccagaaaacaccttgatttgagcctaatgagacctattttgaatttttgacttccataattcaagatattaaattcttgtttttttaagccactgagtttgtgctaatctattaaagcagcagtagaaaactaatgcatttagcactgcatctttctggatttttggtcattttaaataaatcagctaatagtgtctactgggtatctcggcatacaaataactgtgtcaaaggagttggaaaagtatggagaatgtagaataaatccaaactctaattgttgtctacaagctcctgctttttctctccttcctgtctttccagccttaccttatgttacgctgcactctctcagctcccactcctccagctgtctttccattcctcagacttcctgccgtgggcccttggctcatgctgtttcctctgccttgaatacccttattccagatcttccaagaaccggcttcttcccatcttttaggccttagcttaacccttcctcctctgttagtcagaagagtctaagtgctatcacttacaacccaatatcctagtggtttaaaacaataaagcacgtgtccctcacgtcacagtgcaaggtggttggggtgtgtgtgtgtgtgtgtgttgggataggaattgggattctgctttgttccacacagccaccaaccattccagcttgtgacctctctttcccccggtgccttctcggaatccttagcaggatctctgcagtcacctgctgaggagcaaggaatgcgtggaggattgtgtgggctgggcctggaatgaacatcacctgggccacattccatatggcctcacctggatgtgaagggctgggcatgtagtcttcctgtgtgcccaggaggaaaattcagtagttgggtggataatagccctgttctgcccttcctcagagatgcctcttataaccgtgctaagcagatctgtctcattagcctctatgaaaacaccttatttagttcctccattgcactttatactcaataattttttggcttctttgttaattgtgttcctctccaagaccagaagggtgtgaggataggaacatgtctgttttgctcactactatgtgcacaaacctggcaatgcaacatcttgcacagagtagattacccaccaagaatagtttattagtatgtgatgaatggatgatgaatgaatgacccaacaagtgaatgaatggaaagcatagaccttgtctagagggtatccactattatagcaaggacagaataaataggtcatagtcttttacaagaataaatttcaagaagcagccaaaagctttttttttgtttttgtttttgtttttagaaataaaggactttggcctacggttcaaaaagtgtttggaaagtcaccgctctttgggttgtagaatttgagtccagtcttccagatgagcagcctgagagtagcagtgctctccttatttgggttgattaattctgctcttgtatttctgagaaagtgtagaccctttcagataccatcctaactcttcccccacccttcccttctccactcatagaggacaaagcatttggctcctctcctcctaccacctgttcctattaatatattcacagtggcccccggtggtgggagcatgccacctcagatgaaggagttttctaattttgcttctccttttctttcccattgtcattgtcctttctggcttagcatgagctagtggcatgtggcagtctgagaagtggaatgcctaacccaaggaaataaatgatgcataatcaaatccagttgcgtaacttcgggagtttgtgttttcttctgttgattcacgaagatcaaggagctgatgggaataggttctggccttgccaccaaatgtgcttctcctcccattttctgagtagggctccaagggaggtgctgggccactttgccacgcaggctggttgctgcctcatctcctgcaggtgagggtggagacctcgcgggctcatgggccctgctgtggctgttacatggatccaggttgtctagggtctggggaatgctgctgaaggggcccaagtgcctgtaccctggaagcactggccaggcaggactccctgcctcaaatgggcctctcccaccttgttctgtctctcatggggcaggcacatggcatttcctaggtggggggaccaagaagctgtggctggattaattcttgtgaagagtacaataaactacatttaacttactttcccttacttcaacatggttacacggataaaatacattaaaatgaacactaaaatcaagtatgtggacaaagatgtatcaacaggaatgttcagtaatagaaaaaaaactggaaacaacttatacattcacataagggaggagataaaaataaattatgatacatccatagagtggaatacttgaagccattaaaattgaacatgtagaagaatattgaatgaatataatcacattcatgtttaatttttaaaaatcaagctgcaaaacagtgggtaccatatgatcctgtatttgcaattaaaatgtatacaaatataaacaatggaaaatataaagattgaaacgggatgcttagttcagtaaatgggattatgagtgattgttgttttattcttagtgcccaacggtagttcccaaattttctgtatttaatacatatttgttttgaaaggtgatataaaattctaaaatggtattttaaaaattagatgactgtcttagttcatttgggctgctataacaaaaacatcacagagtgggtggcttataaacaacagaaatttgtttcttacaggtttggtgtctggtgaaaacccatttcctgattcataaacagggcctgtgtcctcactgtgtcctcacatggtgggaggaggaaggtggttctccagagtctcttctagatggcactaatcccatttctgggggctccaccctcatgacctaatcatctcccaaaagcccctccttctgacaccatcacattggaggttaggatttcaacataagaattttagggggatgcaagcattcagtttatgacattgactaaattctccaaataattacttgtttattaaaaagaaaactattgaaagaattcttaaacaacaaaacaagtcattaatgtgcaatttaaaaagccccataacctgcttttctgtctgtcctcagtacagatgttttcccttcctactgcacacttaataagtctccgagccttgtagattcattgtagattcagccttgttagcatctcttgtatccagtccctccatcatattctccctgcccctgcctttgtcacctgttgatgggactccctgcctcctggctttcacttacaccgttccattgtccttcctgtcaccgacaacctggcaaatgtgatccatcttaagaggttcaagggccacgtgttctcttggagtctttcctggcagtccccacttttgtctccagaactgatccttctttatgcctcactctttgttctgaatcctctcacagaaccttttaatctctactgcgcttcctgacacttactttgtgccaggtactttatatttctcccgtatcctggctgtatccctgtgaggatcatagccccacttcacggatgagaaaactgaggcacaaagaggctaagcaacttgcaaagacatcacagatagggactaataagattcaggttcaaacacaggcagtgtggctccagcatctctatgctgagcatatatatctgctgctgcttctcatatttctaaggtctttcacttgtctctcttcccctaccacattgtagaggggggatcatgtgttaaatttatctgtatttttttggtgccaagcccaggggctggcatgtaggaatctcataataaacactgattgaatggctatttaggcaacgagtatttactcagcatctgccatgtgtcaggcattgttttaagcacccacctgaaataaataagcaagaaaacagatcaagagtcttgccctcaataatggaggaggggggtgacttagattctagaagaacatgtcaagggcaagttaggtaaatgattgaggtaatatttagatgacatttttactcctgtatccatgcttctctagttctcttcttttaaattttgggtatgatttgaggcaactacagtactggaaattaatacaaatccttcatttgtcatatcagagctctgtaactggtcacatataagcgagctgtcagtggtcgaatcatgactgcctgttgcttctcaatggtttgaaaacagttttttgaaatggcattacatttctcatttcttcatgctcttctttcttgcttatcttttccactttttttctgctttgctccacctgttctcttgagaaaccatctcaatccctcctgcttcttcctacctcattctctccctcccttgcttcttaatttccgttcccctgaaccttgccaaatatgtttttttgaacagttgatcaaaactcatcaagcacaatgtgattttctctttcaaactgtaggtaaaatggagaggaattaatctgaccaaagtgtgtgtcaccacatgccatagattttgtctgggggcagaagaagggaaaagaagctaactttattatagaggtcagagcaacctcacaatgtcgatgtggtttctgatttattgtaacacagcagagattcaaaaggattaatagtctaagtgacctaaataataatgagcgtgcagaagaacatgttcttcaacatgttgcttactgccgtagagagagtggagctctgaaaaaaatttgcttctcctgcttgaagaatacatttttctagggtgtcacttattaagatgaaattgatgtattaagaaactcagactattcccaaataatggcattatttttaaaacaaatggagtcttacaggaatagaaataacctattatacttgcaaaataccagcttaaaatataccaccagaatatgctatttcttcatttttgcctccccacactccagtctccatgaatgcaaagcactctttccttagaccctacattgaattctgatggctatggtgtgaccataggaagcctctgcatttatcagtagtttccctgaatcttgggtaatcatacaactcatatttccagaactttatcttttacatgtattcttttttatcggactctcttccaaacattgtcagtattcctctatccctgtcagtccactcaattctttaattctttcgtagatttccagcctcactgaaccagctcacaagtcacccatgacccgcccaatgccaaaaccaagcttttccctcagccctagtcctcctcagccttccagagataagtggaattcctgggttaatgcctgcattcaggtttttccccaggaacaaatggtcacattttaaggaggactgggggagaaatagtcaaggccctatgaacccaaactgggaggattcccctgaaatagaggaactctggtgtaatgagaacatcttcacagagcaggtgaggcagatgatcttcctgattgagttcccagaggtgtcagctcactctcagaaaaatgcagaagcagccctggccctacccgaggccccacactccctacagtcctctgctgagctctctgttgcctgccaaggtgggccacactctaggaaagcatctcatttagagaaatgctgtctttagagatacagtatttgaccaaccctggaagcaaagattaagctccctaaacccgaaaacattcactcctacaatggtccacttgggaaaattcctctaagagactcattgataccttgattcttgttttctccttcttctcccctctggctcttcgtgttcataccctttatctcctctacagcagagatgggggtcttaaggtggtttatggaaataacttactacgagcgttcatcgtttttagaaattgtacacgatgcaagagctccttggagtcacaggctctcagcctctgtctagggagtgccattcctatttggttagagccattctgcccagtgtattcctggtggcctctttttaaatctcccgtccttagtgcttgccagtatatacactaatgttgatattagcatgggaccatatgatgcagaaattccacttctgggtacctatccaaaataattaaaggcaaaatttccaagagatatttgtacaccatgctacagtagcattattcacaatagtcaaaaagtggaagtaattccagtgtccactgaacaaacaaaatatggattctacatacaatagaatgttattcagccttaaaaggaaggatattctaatacatgccacaacatggatgaaccttgaggccattatgctaagtaaaataagacagtcacaacaaacaatatgattccacttatatgaagtacctagagtagtcaaattcacaaatagaggaagtggaatggtgattttcagaggctggagtgagggaggaatggagattggttgtttaattggccttgttgcagttttgcaggatgaggagagttctaaagattggtctcacaaccatgtcaatgtacctaacgctactgaactgtacacttcaaagttaagatgataaatttgatgtgtgcattttgtcacaatgaaaaataaaattaagtgtaaaactattttaacctggaagaggaattagaaagtaacatcaccaccaacaaaaatattcaaagaaggtattaattcactgaaaattccaagaagtgagagttcactgagcagggaggcagagcattcaagatgaccatttaagatgaactgaggaggataggtagggatccaaagtgaaatggaaacagtttttaaaaaattacttgcatttccactgaagggtgaataattgagcctttactgctgtttatttttctagcgtcttataagctgtttatttatgtttaattatatatttgttttatatatatatataattgttatatttaatcaagctgccacttgattaaaacgacatcttgggtttatgtgggcaagagaattccaagtgccaccaaatccctcagaactaattacactgtaaaatatcagcatcctcaatgtagaagagttaaccttactgtaatttagtattcaattatgaaaatattgtataatatcctgaattcttatgaaattattatttttttcatatttctgggaaacaaagcgatgtatttatttctgttttgtggattacctgagaaacaagaagatgagacatgtgatactatgtatgcttctagtgcaaggatcttctcattatgaaatgcattactttgtgatggttatatgtgagaggaagaatatgtcaaaattgcctggcaaatcctgcttattttgatctgctccatctttctcagctttggcaagcaagcacaaagattgcaatttcccttgtatgatcccagaaagcagattgctgaatcatgagtcctaacttcaggttgaaggtgaaaataattccttcagggagtaatacatagctacagtctgcagaattaagctgataagagatgacattgcattaggaggttacaataataggatcaccttaaattaagctccctgaatgaataaaataagcctattactctgtggttcacctcagccttgtaaaatgcctggcacatcagaagttctggaaaagtgtcaaatagatgacataaaaaatggggtattctgataatgcagtgatgggatttgaggattatcataaacgattcatttttttttcattcaacaactatttctcaacctctcactttgtgctgggtaccgttctaggtgattcagcagtgaataaaagaaaaaaagttatttgtccttaggaatcttgcctgctaatggggaatacagatgatttttttaaatcgtgaaaatgctaagagagaagattaagtgggaagggagctctaagatatcatggtgtatgctgaaattttagcaagggtggaccatgcataaattaggaaatttctaagaattagaatacacaaaaggctgtggtatttaataccattcacctagtagagcacaaagaccatttgtggggtatgagggaaactgaaatctaggtctcgctttgtcacaaattcattgggcaagccatgctctcccctgggctcagcacgcagctgtcaaatggacaggttgggccatgtgaactccacacctcttacagctctaaagttgtgtgagcattcatgtttctttgatgatcttaaagacccttcaggatcttgcagttcagcacataaaaacaaattcccatgaaacacattttatttgagcttcctggtcatttagattctggataaataggaattttttgccatctatataatgcataataaaatcaggtcttataagatgcctataaacttccatacctttgtaatcattttcttttataatttcaggtaaggcaatttgcttcccttcattagagataagtataggcacagagcaatttatatgagttgattatagtgcattttactataattccatggtaaaaaagcctgattagaatcacatattcactgtagcacctattttctgacacagttcagtatcatgcaggttccttagaaattgtcggagggaatgtaattatccaaaaatgctgaaattacttgttgtaaactagcctatgtgttatggatccatggcttatactaaaagccagttttcaggtagagttgaatgtagctagagctgctgcccccaatgtgacatcaacatttactgaattcatacaaagatgtgtgatttttttttttccacaatgttgggattatacttctaatttgccaaagaaatagctaagctttctagagtatggagtctgtccagataatcttggtatagtctccttttttggagggtgtgtggtagcgggggaatcatgtggtccctggaactctgtatgcaattatttgctctgctgataaaaaaaaatgttttattgctacaaaaaggggtgtaggtagcttgaaaataggtttcgatttagtcattgtactagagttctgggaaaacaaattgttcttttgaatttctgaacaataataatttgcttaagacattttgcacaatcatgataagtaacacatcttggtaaggaagtcttgcattggcagagcatctgtagaaggactgctacacagataatgagcacagttatgtttaaattaaattaagtgggcaccaagggatagaagtagatagggaaggaggaagtaattgaagcagcaaatagtccgaggcacagaaatggaaatatgtgtaaactctgcaaatttaaaagtcacttgatgccataaactattttattaatttctctggagttttaaattggtacgagtaatgatgactgtggaaaaaaaatcaacatatgcgtcagaattggggaagaatctctttgtgtttaggcactttgggaccgaaggatatttcccagatcctcgatgtgcaaagtgtggtccatggaccaaaagcattcagtatcctggggacttaatagagatgcaggatttcaggccctgcccagacctactgaatcagaatctgcatttagcaaagtctccaggtgatatacatgcatatcgaagtttcagaagcactgccccagagttgctaaaacagttcattcattcattcatcaaacgtttttagcacctctttcgtatgccagacattaaactagacaataggagggagagatcattagaaacataggtaagacatggtccctgcactcagggaacatataattgaagtgggacatatgagatatgaggctgaggcaggtggatcacctgagctcaggaattcgaggccagtctggacaacatggaggaggcctgtctctacaaaacatacaaacattagcccagtgtggtggtgtgtttgtacatgttacgccggaggctgaggagggaggatggcttgagcccaggcggcagaggttgcagtaagccaagatagtgccactgcactccagcctgggcagcagaacgagaccctgtctcaaaaaaacaaaaacaaacaaaaaacagatgtgtggtacttgactgtaggatgccagggtggagaatgtagatgatgccccagtgttagccctgggtccatgagtgttgctgtgtttacagaagactaggggttaaagagaatatgtctagccttgaaatgttgggttttgaggcagctgtggaatttttcaggtggaaatgtctagtaggcagttggatcttggggcaaggatcagtaaactatggctgcacagaccaactcctggcctccacttgtttttgcaaataaagttttattggaacccagccaaattaattggcctacatattgtctctagctacttccacacaataaggacagagttgaataggtgcgacagagactaggtggcccacaaagcctaaaatattttctctccagccctttacaggaagtttgtcgactcctttcccagagggttctagagaggtctggaatggagaagccatgtggaattcatccaggcctgagggggctgctgagcctgtcctgggaggatgtagagtgagaagagacaagggcaaggtcagagccctaaaagagacacttcttcacaggctcttattgcacctcaggtagctccctgagccagtcacagtcatttttttcctggtaacttttgctgcagttatttgattttttttttaccttggcatttgcaaattgattaagccaagaaacttgtactagttcagtgaaccaccttgtatctaatttataaacctaaattaacagattctgcacagtaacaaatagctattacctttaaatgaaagctgcaaggaacattatagtttgggcctaacaatagagaagaatctcatcttcccatgaaatagaaaggaaaaatttaatttccttgtaaatttgtttagcttgactcttatggctggcagggctgtgcagaggtgcttatagctcctggaagctccagtttccttaatacaagccccagagtagtgcacaccgcaagctgacttgttctccactctttgtccagttgggaggcagcccctcccctcagacacagggcagaggctaagacgggaactgagggagaaacgggatgcttctgtaggacatggtttcgtgcataaacatgcaactatgtgtgtgaaatttgcacatttaaaagccattgtctaccataaactcttatgtacttcttgggagttttgtaaaggtcttcctgcatgaaacattttgatggaatcatcacaaaaagaaaaagattcaagcatcagttctcagcacgtctttgttaacaaaaataacacagatcgctttaagtactaggctccaagcgagttgaggttgagtgatttctacatgttgaggggaggaggaggagaaaaaagttgtgggtgcaaatcagctcagcaccttcattattggtgcagaaagtcaactatcaccttatttttatactagcaccaaagtgtgctttgtattctctggagccaggcatggtgcatggtgctttcccagatgtcctttaatttaacatcctgtggacactgttcagatacaatgcagctgccaaaattgttgatttatatttgatataaggtcaaagggtccaggagctcttttgataaaagataacactaggttagcatgagatttcgctgtcagattagcactcccgagttggcctccatttccacaaagctactttatttccagcatttctcttcactcccatgggtgcctgaggctgtctgttcacaatattgcagtgttgggattttcttacagggccgtggctcatctgggcatttgtttactctggaaccgagtggcaccaagcccttcgtcacatctagctttttcacagtgaacgagccagtgttgtcgtgaccagtgcctttgtgccccttcccctccccgacctcactggccctggcttttggttatttctgcattttcgtgactctttactagagaaaaatatgtgtaaagtggggaattgatgagtaggttgctggtcatcaatattcagtgaggaactctgctcagcacttacatcagctcactgaatccttccagtctccctgaggagtgtgtccaatagatttctctattaaagaggaagcaacagaggtttagagaagtgaaagcatttccccagggtcaaaaccagaaagtggcagaactagattagaaccacatgtcgtctgccagaccagagcagagctcttaaccaccatgccgagtgacaacatgaacttgagacacaggagaattgggtcccagagccaccaaactgtggcttctaatttttgcagtctctgtctcaagggaagatatccatttgtcaccccctcgccccctgcaggggggtgctaatcaggttgacagagccctgcaggtctgaataacaagggcatccttgcaaaggtttgccagggtggctttttgatggcctccccacagatttgtgatcacacattttctgcaactttattataaaaaattctctttatggaaagagagaaacccgagtaaatatgaaagaaacatcaaaaccaacagagcaatttctaggatatggcatcattcctcactcacatctaacagctagttggatcccagatgctaattggaatagtagtaatattaatgactgttcccaaatcttgttatcaaactgtctcgtcacccacactagatgcctatttccctggggttctgtccttgcatgctttctttctctttgtcctggcactccttccaggatgagggaacatctttttctgtcaggtggtggccacctggtccattctttccagtcttctcacatgttctttcttcctttcacctcatatcctgtttgcaaaggtgaatctgctgcaggcatagagaccacatgggtcccatctcgatttattctcaggcaccagaatctgaatcacttaaaatgaggtccaatactaggagcaattggtaaatttctccctcatgggacattctaaagtggcttcttttaaaacttccttgagaatgagatcgctttaaaacctcactatttattttacaaaacggtctagggaagatgcttacagattgttagcagttctggttgcaaagcttcattacagaaaatagttgaaaattttttcagaaattaagattctgggttatctgtgcatttcatttatacatgcttttctaatattgtccctcttgtgcagacaacccaagatcttattgcaggtgagtagagaatagatttgtttcagccaccatgctaagagcttgctgtgctcagcagtctatagagtgaaaatggagactcacatggaacgcacatgccagggaccgggcactaataggtaagctgatctattcctcacagccatcctctgaaggaggatatacctctatgatcctcgttttatagatgaggaagccaggcacagagcaggtgacccacttgcccaaggtcacccagctcatgagtagtagagctgggatttgaactccagcaatctaatttcagggacagtgcttgaaccgtcttttcttttctttctttctttctttctttttttttttttttttgagatggaatttcgctcttcttgcccaggctggagtgcaatggcacaatctcggctcaccacaacctccacctcccgcgttcaagtaattctcctgcctcagcctccggagtagctgggattacaggcatgcaccaccatgccaagctaatttcatatttttagtagagacggggtttctccatgttggtcaggctggtctcgacctcctgacctcatgtgatctgcccgcctcagcctcccaaagtgctgggatacaggcgtgagccaccgcgcccagccaaacccacttttctataccttctgacagacaaggaaggtttaacacctcctttgcagatcttatggattagtcagagagacatttgccaatctaatttaaggcatactgtgttaaataccataatagaaacataaaatagagtgctcttagcccttggatattttcatgtgttgttaaaagccattttggatctgcttcccatcccagagaattatcaacccctcagataattgaggaaaatgaagtaatatgaggtaaagggctattcaaactggctttgcttgtcagtcaccactcctaggggccaaatggcttttctcacatcgtttcctaaaggctctgtttgtctccaccagcaggtctctgccttccctggaacgaaatgtgtgggctcagtccttgattatggttgctttcaaatgctttgtagcaggggcagtgtcctgcagaaaggtgggatgtggctttaacccatgacaatagagattggtaaagaaccaggttacaaattctaaaccccacacccctgtgatgatggaacagcctttgccaaatctccccaagcttctccagctacaaaatgggcaaaataaaacttctctttctcctcctcctcttcctactcctcctcctcctcacctagtaggagtattgtgaagataaaaagcaataattggtgtgaaaatgccctgagctccatagatgaaagctctctataatgtcaacatatcattacactgactttattaggatttcaatacggttctgtggctcatagaagtagctctttcagctggtcatatgaagtcctaggtctttactccacaaaggaattatttactgcaaatatagtcaggtcaacactattcctagtcagggacggcctagagttagaggatagacatgcctcgatttgggaagcactgtgtagccatgcctaacagcttcttgtaatggggaacgacctacctcctgaagcaacttttggagaccactagtgtgcttccttgtggctgggtgcggtggctcatgcctataatcccagcacttcgggaggccaaggatcacgaggtcaagagatcgagaccatcctggccaacatgttgaaactccatctctactaaaaatacaaaaattagctgggtgtgatggcatgcacctgtagtctcagctacttgggaggctgaggcaggagaaatgcttgaaactgggaggcagaggtcgcagttgagccaagatcgtgccactgcactccagcctggccagagagtgagaatccgtcccccccgttcccccccaacaaaaaaagaaagtgcttgcttgtattggcactggttctctttctctgcagccttggacttcgcagagcacatcaacatctgacctttcagatgtttgaagatggataccctgctcactcagagacattgctcactcaactttcttcagttgtgtcttacatgatgaggttttgaatcctctcctccagacgtattccaatcccagaactacactccaggtagtctgaccaaagcagatggccccctcattattctgctaccacagcctaagattacagagtttttggtagctttgtcatactttactggaacagcctgagggattcttcctgcctgctacataaagaaagaccacagcattgtagtaaataaagtgcttaatagacatgaggccgcctcgccacgtgggagatggagttcatacttaaatcatctcatcaaacttcctgagttaggggtttttcaaaggcagtttagggggaagggtggggtggctgggcttgctgctgattggttggggcagagattaaattatagggggttgaggctgggcgcggtggctcacacctgtaattccagcactttgggaggccgaggcgggcggatcacgaggtcaggagatcaagaccatcctggctaacatggtgaaaccccgtttctactaaaaatacagatacagaaaaaatagccgggcgtggtggcaggcacctgtggtcccagctactggggaggctgaggcaggagaatggcgtgaacccgggaggcggagcttgcagtgagcagagattgtgccactgcactccagcctgggcgacagagcgagaccccgtctcaaaaaaacaaaacaaaaccaaaaaaaagaaaaaaaaagttatagggggttgaagctgtcctcctgtgggttgaatcacttttgggaggtggggggcgggcacaggagtggggttggtgggtccattggagccgtaagtgtcaagacattcaaaacacttgaaaagatatctcaaaaggcccatcttaggttctacaatagtgatgctatttgcaggagtagttgaagttgcgtatcttacaacttctggaatcatggctgataatcgtttacacctgcaccttagcagcacgcatgcatctcttctccacacagcctgatggcctcccattagctttataaaagtgattgaattttgagggagaccttttatcatttaaaccatagcctaaatgtctctcaaagtccgcttggcccaaaagcccaggaataatttagggaaaggcaagataggggttgggttagttcagctgttacaatttttctcactgatagaatttttgcaaagccatttcattactgttagagtgacactgttgacaatctctgcatctgtaccatatgtacccctgctagatcgtgtcttctaacatcagctgtgactttttttttttttttaatttttgacagaaagttacatctatctctcaactgaaaattttattgaatttggtgccaagctattcaggtctttttaaatccacattttgctgtctaatatattaaccaccccctgcaggtggtaatccaagcttctgggcatttattctagaaagagtaaagggtttatttcttgtaaatatagggaagtttaatttgatccactgtacatggatagttttgataagaatgctccctgcttttgattaaatattccctgggataagaacaagaaatactttcctatcaactaatgcatgccctttgtaactctataattgtcaatcatcaagttattgagctacctgtctctgtgtctaaaatgctttgctgaagtcccccttgtctgcttcattttctctggtctctcaggtttgtggattgggttggctcctagggcaccaccatttttgactccctttacagtctatccattattatttctgggatcaatttctagctgagccacctgtacctttgagaattctccctttctcccttttaaaaattgtaggcatttgcctaattccttgattctgtcccgctctgatggatcatgtcttcctcaacagactctcccagcgggttggccatgtcatttgattttcctctaagcccatgacacagtttgcccagatgtgagatttgaattcatttggagcagtagatgttttcgtcctacccattcatcacgccttggggtctgctttctttgttttgtccttggcaatccaaaggcactcctccttagtaggaaagccaatggcagctggaaaaggaattgagcgctctttttgacctccatcagcaccatactatgaaaggcagccaattgtctcaggccttctttgatgttctcctggttctgagcctcacaaagttctttcaaatgttactttcagtctttaagtgaatcttattaaaatgggagtacctctgagaagggttatactttgaaacataatacaaccagtgaggtgctaatatctttgcaaagctgctaactcagcctatgcagttgcaggagtgggtgtggcttttaaaggaaaacaccctgaattgctcacttacggctggtctgaaaaatgtttccttcccaggacactgtacctggcaccactgaatggtgaagagccgcccattttctttaggggaaatgctccatcttggagtatgtttgcaggaactgaagtaagagatgtagctgaaaaaaacttgaattaggagttaggaaaactggaccatattttcatgatctgcttctaaatagactctgagacctctgtgtccttctctataacatgagaacattggatcaactttaaatcatctgtaaggtcattcccagcatgtgattctaagatactttctcctaatcttatcccgtctttaccactatagttggctgtgtgtcctatatgcaagtcacgtcacctctttgggtcttcgtcgattttagagaaattattgtttgtttgtttgtttgtttgtttgttttgttgttgtttttttttgagacggagtctcactctgtcgccaggctggagtgcagtggcgcaatctcgaatcacagcaacctccgcttcctgggttaaagcgattctcctgcctcagcctcccgagtagctgggactacaggtgagtgccaccatgcccagctaatttttgtatttttagtagagacgggatttcaccatgtgggccaggctggtcttgatctcctgaccttgtgatccgcctgccttggcttcccaaagtgttgggattacaggtgtcagccactgcgcctggccaattctttgattttctaaagagctgcattccatggaagcctgggtagaggcaggatggacatgtggagagacatcctgtcctcccttgtccctgttcaccagagcagctccatacttacctattggtcttctgcctaagctttcatttgaagaaaggtttttgttgttgctttgtcttatttggtttgttttgtcttttcctactaatgggcttgtctttgtagtgtccatgtagtgtaatatcatagatgactctgaggaccccatctagctcaaaaattagatattgagctccttgagagcagggatcagacttgtcattctacctccacgatccttcatagagtatagtaggtgttccacaaatgcttgttggatgaatatgtactgataataataattatgaatgagctcttattccatgctaggtatccagtgctttaatgggttacctcaattaacccttaaattaatcctataggatagatgttattctatcccattttacaagtatagcaatggaagtacttaaacttcagatgaatggaggcaacctgatatatctgagaaccaaggctattaatcaccttgctacatggcctcatttctgcctataggacatctgacttaagtcagggatgaggaagctggaaagcaaagccaacaggaagggaagcaccagtgtggagataatgctggagagagggatgatcctgaggtgtatgataaagggctttgaggtgaagtagaaggtcggtttcacagaagtgagctccccagaccactgacataagcatcccttgggaactttttaaacatgcaaattctcaggccccatcccagactgtttgaaccagaaaagttggagataaggctcaggagtttgtgttttgctaatccctacaggggactctgatgtctgctattgagggccattgctgtggatcagcttcagggacttcggttttgcttctggagagtgccgaaacttctagttttctcactgttgagataaaatattttatatctggagcgatatttaattcttttccatttttaagataagcctaagcaagatgtctgcttggactggagactctaagtatccgattccttctttttaccttctgtttagtctgtaacttgaggcccatcacttaagtcctgattctttgcctgtaaaatgtggttaatgacgcggtgctcccatattgggatagccagagaagtgtgtaattagtggttgtgaagcatctggagcctagagcgccgtataaatgctataggataataaccagtttacggccttaaatgctgcctacaacttgacacatttaaaatttcttccttgaatcgtaaagtttaaagttaatttaacagtttggtctttgcacttattttttattcattttgtagccggaatgttgtttctttgtgcttctttcaaccttccagagaaaatgggtaagacaaaaaaagtttaaaaaatcagcaccttcagagaaaataacctctccaaagcataatgtttgattgtcagacatggattctatagacgttttgaacagaaagctgagatactccataggcacagagatagttagtgtccatgaaaatgcttgttctttgagactccagcctgtgagtctttaaagagagttcatcctgggcagcgtcttcatttctgctcggccttgtaacagtgaccctcctccttggatctggaacccgagaagtctgaatcgtattttctacatggtcattctttatttaacttaggcaaacacttccttttttagacaagactgcttgtccaatgtacacactcattttagattagatttgcaagagtacaggctagttcattttactctagttcaaagtctttttttctttccccttagtctcaagccgatgaatggccaaaaaagactgagatgaagatataacaagagcatttcttttgagagtttaacttgggctgaatttatatagagaatgcacatgtggatagataatcagagaaacgtgtataaaagaggcttttataccaacagtatggtgtgaagaaaaaatttttaaatgctaaataaccatagtttttattttgtatattataactttaatactcaagcataattactaggcaggaaaaaaaccttcactcttttattaccatttcctgacattttaaattacacactattgctgaattaaaaaaaaaaaaaagaaacagcagaaaaaggctaatccagaccctgaatcaacatactaatttataaatcgagtctcaggtaaacacggttgtttctccttgtgccttatgctggaggtcaaatgcttacaatagcctaaaatgacaagtcgagacatgttttcgtaattggaagttaaaaaaagaaattccaccatctgttgatgaaaagaaaagttttgcaataactgctgtcatttctgaagaaacatctctaaattcttcagaaaacagtcatggtgcttatgacagctaaaaatcatttggggcaccattaactgattatgaactacctgaagaatcatgctcatacttaaaagggccacatggaatccttttagcagtttcacaactgtctggggttattcattgcagactgaaaaatgttgctttttcaattccaagtaagtcaaaatgaatgggacagcagatagactggaagggaaaaggaggaggaaaaagagactccctcctctgcactttgaagatcattagcccaacccaagaatggcttctgtttctactgagcttgatcacgatttgctatgcactacagtgaaatgaaatagtagtatggctggcaaattatgagtgttgacagcaaacagacaggaagagtttaactcctccttaccttccacactagctttaaaccttcagataaggcaaaaaaaaaaaaaaaaaaaaaaaaaagtcagcaattgggacagtgtgcccttcataatagaacatgggccaaccagagatttttctcattttttgatcacctatcttctctgggcctgtcttttcttatcagatgtaaattatttgtttgcagcatttctgaaattgctgtaagaagatcaatagaaaagtggtgaggaaagaatataatttcaccgccctcactctctgaaagccagctattctcgagtcgtgtgtacttcctgccagttcagtaataattaatgtatagtgtgtctgtaaactgcagaaacagattaagaaataagtgcatttttatcattgtttggatgatcctaaagcgttttaatattatattgtttagtcggcaaatctgtacaataaagaaaacatgtttgaattaggtcatttaaagtttcctcttataactcttaaaacaggaactgtggcttttcagagaagaaatattttccttgaggaatctagatgacagttttctgtggtttctcacttttctgaactcccagagctctcactgtctggactattcatatctcacctttcagtacctattttcatgtgcttgttaattctctttttatgctctaacctggccagactataaactccttgaaggtaagaatcatcttctatatttccctatttctcaaagtacctacgtcaacagctggtcaggttgttgtaataggattttatgtatttaatcacatttactgatgtaacccatttcttattgaaataatgtgttccacctcagtgtatgttcatatcctaaagtcatcttgaaatgtattatgtttcccagtctcttttgtaaaataacagtggcctcattcaacatagtggttcgtagtaaagtgctttcctactgggctctgggtgtataagatgattacgatattgcaccgttgaccttcatcccagtgcacagggtcagattgggtcatttctgtgtgagtacagttgggaattgttaccactctgagaaccttacacagttggacaacgtaagaaaaagagagtcccccgcttagatggtttttatttatttattgcaattaatgaagaattcatgaaggtggccttgctgaaacttgtcttttgaaagtaaatttggcctctgattgaccttccagagacaaattcatgttcttggatgttgtgtataagtgtgtgttttagaaaaacaaagtaataatttagcatcaagaacatatcattgaaattcttagaaatcccataattgcagctgtgtgcaggcgtattatatgaagaaaaggaaaacaaccccttaactttgaagccttgcttgtgctcagaatacatcacagaaaaggaaaggggagagcgttggtggtgttattgcttttatttttagaaaaagtagaggctcagacgaaagtcccgttgcatacagtgagtccatttaaaggtgtatggtatagcatgggaagtttattacagatgtgaaattaggtagtacgtagcaaggatcaatgtttattcatactctaaatttaacccatttaaacatcgcagtggggagtgaatttgcttgtgggcctgaaattctccctacgctgccatgtggaacagagacagagttatggaaaatgtagaaggatgtccaagttccctctccttttgggcaacgtatatgactccagtttataaaaagcaagtcagatcactacaaaaaataaattatcttagtcatactcaggtcttgtcttagcctttgctatggtctagggggtgacggaggacatctgtcaaggccctgtggggacagaaggcacactcagctgggatgttgaagagcagttaatggagggtctgttgacagaggtgtcggcagattgagagaactaagagagtctgaagcatctgggagtggccaagagtgggaagccattcccaaccccgggtctggagggggcaacaagaggaaattgtgttactggagcctggggacggctagagccacagaagaggaactgggacagtggtggctgtagggggtccagtctgctgcctgaactgcagcactggagcaaggagagagcagtacctccggcatttctcccgccaccccctctttcctgccctgccttccattgactgaacctgaagccagaggaaacggaattgaagtagtgtggttggtagaggtcaacaccctggcatggaagagacccctgggagaagcagacactaccccttgtcggagaatcagttcttcccttcaaaatcgggagattatgaacagtgatttttcattggattgactgggagagggaaggagtgcagagggtggttaaaagaacacaagtgcaatgttcccctaagaaatacaatttggggccaggtgtggtggctcacgcctgtaatcccagcactttgggaggccgaggtgggtggatcacgaggtcaggagtttgagaccagcctgaccaacatggcacgtgcctgtaatcccagctactcaggaggctgaggcaggagaattgcttgaatccagaaggtggagattgcagtgagccaagattgcgccacggcactccagcctgggcaacagagcgagactctgtctcaaaagaaaaaaaaaaaaaaaagagaaggataatttgggtgaagatttggcttgtgtgatctgaaagaaaaaaggccaatattctaatatgatttatatccatccaaaggagaaaataaacagcctcatggagcagcggttgagaactcccgcagtggcgcgagactgtccaagctccacccaagcttggccccttaccagctgggctttctggggcaattttctctctgaagctctgtttgctctcttttaaagtagggaaaatgatcgtgcctaccctgtggggttcttgggaggctgaaatgaaaagataattgtaaaatacttagcctggaacagagcactctaaatacagctgctagctgctaatacagacaatccccgactagtcaggttcaacttacaatttttttactctatgaggatgcaaaagcggaatgcattcagtaggaaccgtactatgaattttgaattttgatcttttcccgggctggtgatacggcctaaaatgctctctcgcaatgctgggcagtggcagtaagccacagttccccgtcagccacacggtctccagggtaaacagcccatcctccacagtgtactgtgttgccaagtgatttttggatagtatattttatgttattcacatcccatcatgtctacaaaatgtccatctgtgtaaagtattcaatacttcattatgaagtaggctttgtgtgagatgattttgccccactgtaggctaatgtaagtgctctgagcacgtttaaggcaagctaaatggtgtttggtaggttaggtttactaaatgcatttttgactgatgatattttcaacttatgatggggttatgtggacataaccccatcataagttgaggagcttctgtactctacagagacgacggctcgatcttggcttgggatcctgtctaggaagatgtcctctctgcacagggagtcagaaaggaggtgaggataacggcatggagtattcatgttcattcaaaggaaacatgggctgtagtgggctgagaagcacccacactctctcccttctcacagctcagggagaggcatgcttctgtctccgacagtggtagtctgtggagctgggaagtaggaagtagagagtaagtgaaggatgctaggttcccagcagaacagagctgggctggggtgtacagagcagcaatgggaacaggggaggcacatctagttctgtatcccatcctccacggctgtcccacaccaggcgtcagtggaggactatgccaccataccctgacccgcccttttctgagccaacagctgctaaagcttcatgccggggctgctgttgaaagatgtctcagagccctgctcagagtcttgttctcagaaaatgaccatgctttggagaggagatgacacagtgagtgggagaggtacatgcagctaagagcatttcaggaagaaattggggtctcttgaggaaaaaggatccaaaaaagaactacagatgaaattgattgctttaagttagcccattctatttgtatagttttaaaaataaaaactggaagcaggttggatgaacataatgcgctagcagacttgggaattaggggcagaatgctgctctaaattcaggaaatcatggcacggtttcatattgaacatggtctattcctaccactagcgctttcctggctgatttcttctccagctggagacttctttctggttttccaatttatgctccaccctcaccccaacccacccataaaccagtggctgccggaagcagtatctttcatagtggtgagttctggattttcagcagtaatggccgagagtcagggaccagatgagtgtgtgtgagctggtgagaaaaggtagatgatgatagaaaatgcgcagtgctgtgtgcatggagtcctgcagttctggacattttgaagattacctggcttttgacaatcaatggatttgaccaccttgctataagaaaagattaaatacatctcaaaagccaaatgataaattcaatttcttttcttttttttttttttttttttgagactgagtctccctccattgcccaggctggagtgcagtggcgcgatctcggctcactgcaacctctgcctcccggttcaagtgattctcctgcctcagcctcctgagtagctgggattagaggcactcaccaccatgcccagctaacgtttgtatttttagtagagacagggtttcttcatgttggccagactggtctcaaacttctgacctcaagtgatccactcgccttggcctcccaaagtgctgggagcctaaattcaatttcatagtgactattttaccctacatgatgagtgtagaaaatgttggcatatcaagtcatggcaatttgacatcacaaagccacaatggtgaaaaattagaaacattcttaatgtaattctgtgtggaattctgtggttttagaagtttcagccaggcacggtaatcctagcaatttggaagcccaaggtgggtggatcgcttgagcccaggagttcaagaccagcctgggcaacatggtaagaccccatctctacaaagagttctaaaaattagccaggtgcggtggtgtgcacctgtggttctagctactcaggcggctgaagtcggggaatcacttgagctcaggagtttaaggctgcagtgagctgtgattgcaccactgcactccagcctgggcgacagagccagaccctgtctcaaacaaacaaacaaacaacaacaaaaaaggaagtttcatgcttgtcgtgactctgtcccctaagtgtaacggctagggtcaaaggactagagtggagtgggaaggtcaaatgcagaaatacccctccatgtgcggacaggaagatgtgcaggagtgtatttgtatacttagtgtttgcattgtttctaagacattactgacacccggaatgattcatttcctaagtgttgagagataagttatcttaatcagtggataccttttgaataggttgaatataatagttttgaaaatattggtgacataaaaggcatctaaaaagacatctaaaatcatcagtaaacatttcaatagtggtcaagaacagagcatgccttctttctggagccatctatttagggtagtggtgcttacgggagtggaacaatatggagtcactcatgcattctctgtcatggtgctgggcccagtagaaatgcctattgcaatataacagattaattctgaaaatagaaccaattcctgaaaagccaaaggttgcatatgaaaacctaaaaacagcccttgctggaggctcagtctcttgatctcagacattactactaattggtataaatggtctgataaggcccagagaggagcacccacttcctgccatagagggcatgaagctgtggacataggaagctctcagtaagtgcttcttcagcagacacaagcactgaggataaaggacctttcagtatgttatttagggaacccaaatctagtcatttctggctgttttctttgctttttccttttctagtttttgagttttgacagccagatcctcaccatactagttggtagtctgtactagagcctgcatgtgtcaggtaaggcactctgcaaatcctggcgaggaaggagacttacaataaactcgattgttcttttcctctttaatcagatctgccagcttgtgcctgactagtcctgtcaacattgtgaacagtggagatggtttgcctcagttgcactgtgcactgtaaaagcagtaccaatggctgtgcagacattcctaaagagaatcttagttttcttcctccactttaatagtggtcacccagtgggttgagcaaacaaacatttattgagcacctggtgtgtacaagcattcggctctgctttggtgctgaggagagtaaagctgccagggaaaaccgaggggacacacggacagctccagtggggtagctttgcagtgggactcacacctcttcattctaccagaagccagaagatactcactggggacagtcgtgatgggagtttttccatgagcagcaagagctaatgggccgtttgcctacaagagaaggtgggacagcagattcctcctggagaatctcccttgtggccctctcattgccctctgacagattgcaagcctgaaatctgtcagctttgaaagattgcctgaccctccagtatttggctatgtaagacaggtactgaaagacggcttttgttgaggaactgactcccaataaaaatggttaactatccagtgtgagaaaacacgccgttgaggctgggcatggtgacccacacctgtaatcccagcacttcgggagtcaagggtgaggatcacttgagcccaggagttcaagtgcagcctgagcaacacagtaagactctgtctctacaaaaaaattcaaaaattagctgggtgtggtagcatgcatttgtagtcttagcttcttgggaagccaaggtggaaggatttcttgagcctaggagttagagaccaggagttcaagtccaacctgcaacatagtgagaccctgtctctacaaaaaaaaatttttaattagctaagcatagtactgcacacctgtagtccttgctactccagagtctgaggcagaaggatctctatagcccaggagtctgagtttacaatgaaccatgattgtgccactgtactccagcctgagtaacagagcaagattctgtctcaaaaaaaaaaaaaaaaaaaaaaaaaaaaaagcttcacatgcaaaccagaaagtctccttgcttctcagaatgcttgaagtgaaaacaacaagcattccacctttctctccctccctggcacagggcctggcaaactcctactcatccgtcactgcccagctccaatgtcatctcctctgtgaggtcttccttgttagcttcccattcgcccctgccaggaacctggctcctgtcttccggcacccaccacccttgcatgcactccttcatacactcccctctgcttgcttcccctctaggattgggtgctgcttcagggaaaggactttgtcatctttgtgtacccagtgcctaacttgggatcaggaatagagtgatgggtaaatgtttgttaaatggagagaggagaacatgaacaaatgatcttttataaaggcacaggtgtgtaaatatacaattcctccttatgaccgtgctgctgaaaatagataaacagagggtaccagtacaaacagcttcagacaggagctaactattaaggaaaggtttgttttaattttagtttcagactctggtagtggaagtaggaactttcacatgctgcgattaggaagacaaatgtcccactgtgcaaacagcaagaggatatgactgctgccagcacgcagtacagctgtccccaactctatgaagacatgcaacactcataacagcagagtgcggagagggggtctattcttctcactctgttatgtaatgtgaatactttctcttgcggaaatcattgggaccacttgttgtttgccttactcttaaccctttaatcatagacctactgatgctgtcacccaggctgccacggggtgacaggaaagctttccttcctgcatacatttgttcaagcatttggcatggaagtgataaatgcatgctaatgcagagcttaatgtggagctttcagttagcatcttgcaggttgtgagggattgtttcggctgttgggtccttactcttgcttcttcctgtacatcacagacacgcttcctgtgctgtttgttgctctgtggtgtggttgatggggtgtctgaagtgttgctaatgcagtgcgtgtgatctttagaaatattttccctgaagttatttttaaagcaagtgataagaaaccacagaacaccaaaacccagaaggaaaggaaaactggaggctcccagtctcaggaggcttcaagaatcagagccaactagacagcctgactgggccccatctatttttactggtcttacagtaaggggtaaggtttaggttggaaatagatgaaggcaggcttaatatacttacagagagactgaagtaacagcttgaatgttgtgacataaatgagtttgattgctatgataaaatatggtaggtcagtcttcccaagatgactattgggtgtacatgttactggccataatttattcttatgggatacaaatgagttggccaactttgggcaaggcaccatcctctgtgggcttcagattccaagtctgtaagatgggataagagtacccacctcatagtgctgtttggaaatgaagtgtgataatatatgtgcagtcctaggacattgcagtgtctagtatgagagacagaattttgtaatgaagaaaagtatgcttttcagatccggacaatgctagatttgaatattcagcttcactatatgattaatatatgtgattatttatgtgattctgggcaacctcactattcctctgtttatttgcctgtacaatgggactaataatacctgttttataagctggttgtgagttttttgtttgtttgttttgccacagagtcttgctctgttacccaggctggagtgcagtgatgcgatctcagctcattgcaacctccatctcccaggttcaagcaattctcatgcctcagcctcctgagtagctgggattgcaggctagtgccaccatgcctggctaatttttgtatcttttagtagagacagggtttcaccacgttggccaggctggtcttgaacttttgacctccagtgatctccctctctcagcctcccaaagtgctgagattacaggcatgagccactgcacccagccctggttatgagtattaaataagacactgcatacaaaacatctaacaacgtaatgaaagactattaataaaggctaagatatctacatgatatctgtcaaaattatctttcacaaaaggaatgttatcttagattttattttatacaaagcctgtcatactattggattactcagttaatttattttgaaccctcaattacattctggaaaagtcacagtagacttgaaatgatgttaatcagggatagttttggacctttgtagtggtcacttcatggaatcatttttaaaaaaggaagctaagaaatttaacctaggtatatttaaacaagtgctaaatgtaattgtaaacaaccttttaaaaagtttgctatacttttttttaatgtaaattatgtaaaaggatataagtgaaaaccaaatctccctacctctcctgaccctcggccacccagatctcctctgcagacagacacaacctcagcccttagcagtctcttccagacctgtttcatgcactgaaaccccgagctatgcctcatttttaaaattgaacatcttggagagctttcgatattagccacctcattcctttttgtgccttcatagtattccacagcagattttaaaagatatctttaaaaagcaatataacaatattgttttttgttagccatattataacaatgctagccgggcacggtggctcacgcctataatcccagcattttgggaggctgaggcgggtggatcacctgaggtcaggagttcaagaccaacctggccaacatggtgaaaccctgtctctactaacaatacaaaaatcagccaggcatgatggcacgtgcctgcaatcccagctacttgggaggctaaggcaggagaatcacttgaactagggaggtggaggttgcagtgagccaagattgcaccactgcactccagcctgggtgacaagaatgaaactccgtctcaaaaaaaaaaaataataacaatactgtatataataatataatatatatgccaatatagcaatataataaggctatgttgtggagaccaccttcaagatgaataaaatccagctgctcttatataatgtgaaagtgtgactgtaagtggataaagtgtccagtggcagcattggacagggactttacaattttttttctttcaaaagatcaaggaacaagcaagcatgatgtgctgtgggaaaaaatgtcttagatgactaaaaatcatttgaagctcaaatatacatgcagaaaaattgaagttgttccatgaaatcgagttgaagaaagcaatatttctaaatttgtgtattattttaagcatgagttttaatttgtacaaataactgaattaatgaattcaggtatatatgcctatttgaattaagtgttatgagtaaatatctgaccatttcctttatgttatgaaaagtttttatattcagaaatcttttgggggaagatctcatcaggaaaatgcacactgccttctgcagggggttgcttgggggggggcctcaatatttagcagccctgaacaaacaaatcaaacattgcagagcaggtccaggctgaagtggcactttcattagtaagggcaggcaggaaggctattagccatgtgtgcttgctaaccactgagcccccaaattaagcaggtttaactgtcctccaggtgctgcagagctagaccaccaggaaggcaactgtgtaccaactggacagtgctcctacgggctggcacaaagccaagagacaaattgctcccacctccccagggagaaaatataggacaagatagaggacaggagttcacctactgagtttccctcacaggccaggagtgtgttttggcataaagcatgtcctcatttagactaattctcggcacatatatgggacatgtaggtaattccctggcacataaagggtgcgcttgtttccttaaggaaggaagaatggcttcaccacaactgctggcacccacatgctgccttagaacttttgagtcacgtcaaacagcttcaatcacagggtctgggtaggagaatgcagctgctaggcgactgagaattgaaggcgtccttgagcttcccaccaggagagcgcttactgagtgtctagccccgtctctatattcacagatgggaaaaccgaggcccatgtgggtcaaggttgagggagtagccccaaatcacccagaactgagagtggagctggggcaagaaacccactgtcatctttcaggttcttcttggttattgacaagagcacggttttctgccttgttctcatccttcccctctctagagctccctccttcacgtgtggaggtacagtcggtagccctctgatagtccgtccagttccactgcagtgggctctgatttcagcctgtaagacaaacaaggatgtggcaagcatgggccagagtgactggctgccgacatgcccattcttgatatgaattactacaattatattaaccgcaccaattgttatggatggtgccagttgcgagaaatgactgtgctagatcagagagcccatttgttgccaggccagcactgagcactgtatctgtataaatagagatcaatagtatctctattgacaatgaaatctggggaagagttgcaagtagtacctgatatgcagaggatccttgaggaagaacagggagggacagaaagagggagggaggagagaaggatgggagggagagagggaggggggcatctcagttagtgagattttactttatttgttctaaaaggtggcagaaaattaaataatgtcatgagttttttctaattctctagtgctgttttctacaatgttcaaaccatgttctatcattgaagcagaccagacatgagaaagaactgaaaatttcactttagcttctgtactgctgattcctcctatgggactagggtcatagggagaaaaatcaatggactccagagccaaacagatctggatttgaattctaccttttcaccaaccatgtggccttgggaaagtgactataatctcttttagttccctcatttctaagagataaaaacataccttcagggacctctgttccatgcttcctgggcaccctgaactttgtctttcagaacgctttttgtagtttcttacaatcacttgtttgatgttcatttgcctttgttgctggactgaaggcaccttgaaagcagtgactggatctgcgttggtcgcagctatatctttatcctgtggtacagtgcctggcacataagtatttgctgaaagaatgaatgggtagatggatgaggggatggctggatggctggatggttagatggatggatgaacagatgaatggatggagagattattcaggaaagttataaagatcccagataatgtatggaaggggactatcccagaatctggaataaccaggcacttaaaaattcctttccacttgtagtggaggacctcagcttctcttccatctctacttcaggactacttgactccgaatatactatggccaaaaaaatatttcttggcttgccagtaataacaatgccagggccatgatctatgggttgctttaatgagaggtttgtctgtcattgccacaaccatcatatatctgaagagacacaaatgcccacagtgaactcaagatgcaccaaaaaatatatcattatagtaggagaaaatgctggctcttctaaatggaaagagtggagagctgactggggatatatctaaattttctccttgtctaagagctaacctcttcaggaaggagatgaataaaagaataactattaagaaataactgagtaaaataatcttctccctccattctagcagcactttaggtctgatcttgcccttataacactccgctttctaccttgtgttatggtgatatgtacatgtggccaggggccggatacccagcaggcagtcagttagtgctcattggatgaatgaataagttgatgtcttatttcttctcctaactgattcctgtggttagattctgcatcttgcctttatatctgcacccatgtctagtgcactattttgtgccagttagggcgtaagctctgggtaaatatttgttggatgaataaatgaatacccaaaagggcttcttctggaggaaggccaggaaaacattcctttgatgaaaataatttgtaaagaggcagggagctactggaaggcaaatgtctggggaggagagacaggcctctaggttgaatagaagtagtggtggtgaggttgtctccaaagaaagcaggggaggaagtgtgtgaataataaaagaggaaattgtccaccaggaaagcatctccagctggctgtgataaatctgcattttgtaccagcaagtagggagagtgcctcgggagagagggagatcagggacatggccagtggtttggcaaaggtaatgacgatgataaccaaattgaagctcctgtgtcttttctttccctcaaccccttgtctccctgtattgccaccatttgctttcatttctccatcaaacctccctcttacaagctctattttctcaatttctacttgaccttcacatcacttgcctgtggcttccacccataccccattgcaaggtcatgagaaacccccatgttgctgcagcaacagctctctccatgtgtatctcactggagcagctgctgcctctgttaaccacttccccctttttaaatgtcttgtgctttgcctttcatgtcgccccatcttggggtttctctcctatcgctctggtctctgcctctttccctcttcttctcatcccttcagtgctggtgctcctcaggggctctgtcaaagccttccctcccccactctcatgttccccctgtgtcatgtcatctactttagtggctacagctgccatatgtatgctggggtttccattcctggatctccagtccaggcctcttttctgaactgcaggtctcttagagatgttcacttggccattcctcagccatcgctttccagcagcaaaagctgagagccttgctgtctgccaggcctgcttctcccctggtctgcccctttctgtgaatggcatcactacccatccagatgcttaagccaaaaaccattcatcttcctctgcccaagccagaagtcatgttccctcctttccttccctgtccatgtccagcttgtcatcaaggcctgtagattctgtcttctccgtgtccttcaagtccatcccattttctccgtctccactgccaccattcaagttcagatcattaatgtcaccttcctcggttactggacagtcccttgattggtctcactgcctcttctcttctctttctcccatcttctcatcctccagtccactttcactctcaactgcaatgatccttctcaaatacagtctggactctgtattatccccgcttgcattttccctgccctttagaagaggtaagtccttagcatggttgtaaaacgcttaattatctggcccctacttacttctttaatataatccctcacccctccaaaacaccctctggccacccatccagacacaacagagcctgtttcagccagcaagctgagacacttctggctctcagtgccatgtcctgtcttgcctctggttcctgcaggccacacctcagcttgtgtatcctccaagagcctatccatccacatagacactccttactgtgggcttctgcagtagatgtccaggcaatagcctatctgcttgactgggctccacgtgctgtggtaacagaacttactcttctctttgtctttggggactttaggccttgctcttaggtttcactcctctgagactgctcttgaaggaccctggacagggctactcaaggcagaggtgatccgtcaaggtgtgggaagagcctgactgcccctgccccatgcagccttccaaaggctgaggagtcctaccaccatcaatgctccttgtatgcatcctcttgctatgttacagttgccttgttatttgtttgggaccctcagaagaatgcaagttttgggtttctgtcttttacttgtccaacactttgagcacctgctgtgtcctgggatacagcagtcatggccacttcagttgtgccatttgtgcctagctgagagggcaagtgggggctgaacacagcctgggctcccctctccaggccacatgctctggcttggggctctgtccctcagaggaaacatcttctctacacacaggtgctgtctaattgccaagctgtacacctgcctgaaaaagacagctttttctaattcacaaaaagtacccaacaggctaaggctgacccacacattggaggacaagataaataggttcctactctcacagtgctatctgtctagcatgggaagacaaaacgtaaacaaagaaatatataaccacacagcaaaacgtttcggatggtgaaaaggctctacagagaattgaagagagtatctggggaaatgctgtaggttggtgggtccaggaagatgtctctgaggagccagagcatttacgctgagatcccatgataaggaagccagcagtgtgcacgcgagagggaagagactgcatgacatccctaagactggtatggtcttggtgtgttcgaggagcaaaagaaaagccagagtggatgagggctaaagggcaagaggagagacaaatgcgatgaccaggggatgctgaccgggggccagatcgtgcagagtttcgtaaggcctctctacctgttcaccgtattgtgcccgaggactggctcgttgcatttatccaataagtacctgttgaatgggagaatctcatcatgcctctgtgtacagaataagtagctcaagacagaagctccatgtggccccggtgccctctagtgaccacaggctccagcccaaggccctccatggcttcatcatcttcagaaagtcacttacttcccttgtctttggggcccagcctcagggtccagcagtaattcctggaatttgtcttactaactattctctgcaagtgggactcaagcagttagaaaaatccgtgctatgagtttcatagtcagactgacagcaggccttcatcccttacccaagcagagtttccaaagagaatacatggatgtctaatttctcaggggagtgcagggaaccagcattagcaagcaaggtctctaacagccttcagatctgggtgttttgcagcagtcaggatgacctccaggtagtctcgcagctcaggcctggcaccatttggccgtgctggcctgacaagatcatagctacaggctgtacactctgtccatgaggacgtgctgctgaggacccaagcgtgggcataatgtatgtatcaaagacatattgtagcatgtgcacagacacaacatcccactcctgctgttgttgtttgctttcatttggatcccaacccattctgggcccattaagctaatcacccaacaaattctgaactgtcatctcatcgtgaggctgttccatgcttgactgaaaaacctgttttcacccaacttccctggaagaagcctactgcagcccatttacaaatgtatgcatcagtaaatcaaaagtgacagcacagatctggcttttctgggagaggggatggcagagggagaaacccagtccttcccctctgtttcttaaatgatgccatatacacagctttatttgaaatgttctttaaaaataggtcatcttcaacttccttgatagctcattctctacatcggtgaaactttggctcctttcattttccaaagcctctacctgtgtttttctgtgagtcgagtcatcctccactgagccgagtgaaggaatctggctctcccagatgtttgcaggtatttcctcttcagttgtcactttgccaagtggagcacatgtgttctttaatttttcttcattaatcagtctccaaattcctttacacttgctcctcaggtgattccatcaaatcaacatatttctggagctaaaaatgcctggaagaatacagccttccagctgcagccatccaaacgtgtggattcgcgtatgttccctgcactccatggccatatgtttccacaggttcacttccaggagcgttctgtgtctccatttgcttccctgcaaatgcatacttagtctcatctgtgagttttctaactgagtcttaaggcatcaaaaattaagagcatattgataacagcccagtgttggtgagagagggtgtggggaaatgggcattcttgtacccgttgctgagaatttcaattgacctaacttattttgaaggccattttaaaataaaatgaccttttaaaataaaaaatacagagacccttcacccagcagttcaacttccctgaatctatactgcacctgtatcagtgtggcattgtttatagtggactgtatcagtccatttccacactgctataaagaatgcctgagactgggtaatttataaaggaaagaggtgtaattgactcacagatctgcatggctggggaggcctcaggaaacttacaatcatggtggaaggcggaggggaagcaggcaccttcttcacaaggtggcaagggagagagagagcaaagaaagaagtgccacttttaagccatcaaatctcgtgaaaactcacccactatcatcagaacagcatgggggaaaccacccccatgatccaatcacctcctaccggggtccctccctcaacacgtaaggattacagttttcaagatgaaacttgaattgacgcagaccgaagccatatcatagcccaaagtggaaaatagtctcaatgtccatcaattagaaattattacataaatgaactaagtatattttgctatactcatgtaatggaagtccaagcaacagttataaaaagaaaataacatagatctatgtgcgctgacatggatagatgctaaaacaatatcatgaaattcaaacagcaaattgcagaacagtatgtatggtatgaaaccatttttgtaaatttttattctagctattcacagaacaaaatctggaaggattcacacaaatctcttaatggtgcttttttttccccctcaggttgggaactttctacagtgtacatgtttaaattattggactttttctgtttttcagcaatggtgtattactttaaagttcagtaaaaacaacggaggtattactttatttttgctgtgctcttgaaccaggaagatgagcttttatgccacctattccctattgccccgattgttccctagtctttctcagacatggaggagctttctgtaggctaatcccagaattctttgttttccctcaaagaccagaacagcagcatcatctttttggggtttagttaaaactttagcacgtaaggttttcttaaggtggctttcaagtcttaacctgcacttccaggcccctttaacccgcttttctttcctcttcttttcttttcttaacatgttcagattctttatggattatttcaacggtcttattacccattttttaaaggttttgatcattttctaagcatctgtatcttccccctccttccccatcctttcatgagaggagacacctgtttcccagcctgcttagaattactcgttgatatttgtttcacagaatttttaaaagagggccaaaggaatcggacatgaccttttgcagcagaaataactgtcttttgtctcactcctagctcttcctgcacgaatactgtacatgctgtgtgtgttattacaacagttatttttgttgggtctttttatatctactttatttttgaggtggtgatttatttagtcagtgtacttttaaaaaaaactagcactcctacaaatttatttctcattatttttaatttttatataagcaatatatacagaaaattgtaaaatacaagtaagcagaagaagaaaatagaaatcacaagtatttttactatcaggtatagcaagccttaataattgggtttattgcctccttgataatttctacatatatgaatatttaccttttcttaaaaatgagattatatttaataaattattttataacctgatttgttaatacttaacaatgtagcataagtagtttcttatcattaaatgtagataataacagcaagtttagcatttactgtatgccaggcatgagactacacattgtatgttattttttctcctaatttatcttacgcccacccttcagtaggaaattttcttatggcactctttatctggagtaatctctcttttgttgttgtcgttctgttagtctcttcttttttagctttctcctacacatggctttcatgaagtgaaacatatttgtgattttttgtttacagattaagcattataaatattaacccatccagtgctcatgacaatgctgtatgttgggtgatattattactctcattgtatagattttaaaaactgagatacagagaagataacttgcttaaggtcacacagctagtaagtgacagagctgggttttaaacctaagcaatctagttccggaggctatgctctcaaccgcaaactctcattttcatgactaaatctatgataattatttcaccactcccttctttctgtgcttttaggtttactcttacacacagcagagcgatgaacatcttgttcatctatatctttgtacatgtgttcaattactaccttaggctagattcccatgaatagaattgctgagtcaaaaggttgacgcattttttaaaggttagatacatattagtcaaagtttttaagcaatatgctttctaagcctctttgatctttataattcattgttcctttctaaaaatatataactgtcttctgcgttcaaggataattttttttattaatatggggcttcttgttctacttcctcccctttcgttatttcttcaaaatgtttaacaaactaatacatttccagaacacattatgcttcatcttgtcactatttccagtaccttgtatctcctggactttatgcaatgcgtgtgtgtgcacagatggaatatgttccaccatttggcttaatgacaatttttcacaccactaattttctttctttattttattttttcttttaagcctcacaagaattcaagtaacatatataatagttttgttttcttgatttcaatatatgtaaatttggggggactgcctggcaaggatgaatgatgtgtcagaggtctagaagacaaagctctcacctctgcctctaacttgttttatgaccttgaggaaaccacttaatcattctgcatttcattttcctcatttgccaaatgacaaagtgaactaaatgaccttgaaaacctattttttttttaagtgtcagcctatccaagacgcaagttgatctttgaaaagtattgtttgaaattagggcaaatatgtgtgtgtgttggtggggcagagttggaggcactaaagattagtttcaacatattaaaaatgttttgtgctctgacgcttgaccaaggcctcctgacagtgtgctttagtggtttgtgaaacatatttctaaggccaaggtaattatagttgttccactgaagcatgacaaatggcccctcactttgaattcttttatgggaaagaaaaaccttccatgacaacagccctggaacttaatgacaggctccagatctgggggcaagaatagagacagacattagctgcagtgaagagagagaagacaacagcacgggctcacctgggaaggatcagggcgaggtgatgtaacaataacaacaactcattaatgacattagtggggctctgctgagaacttgctattgaccggacgttgtcccaagaatttcatatgcattgtctcatttaattcccacaatgcggccgggcgaggtggctcacgcctgtaatcccagcactttgggaggccgaggtgggtgaatcacgaggtcaggagtttgagacaagcctgctcaagatgatgaaaccccatctctactaaaaatacaaaagttagccggttgcagtgatgggcacttgcaatcccagctgctcgagagactgaggcaggagaatcacttgaacctgggaggcggaggttgcgatgagctgagattgcaccactgcactctagcgtgggcaacggagcaagactccatctcaaaaaaaaaaaaaaaaaaaaaaattcccacagtgcccctaagagatagattatgagataggtacttttattttttctgttttacaaagatgaacattgggaggttctttaaaaaagaagctacataacctcctttgaattatttagccgttagttgtcagagataggatttgaaccctgagagttcattcattcatttaatacatttgttttgttttgttttgttttgaatgcctgttacacgtcaggcacctgtctaaaggctggtgacgcagaagtgaatgaagcaaaattcttgcttttatggagtttggctaatagaggatgagagcagtcataacaaaccaacaaatcaataaataatttcagagggtaatagtgccgtgaagaaaaatcagctctctgtgaggagagtgactggcatagggggaaggccactttacaggaacctggcaggtagagcccctgagtgatgacatcaagctgagccctatgcgatggagccagtgagccatgcagcgatctattggagggcattttacctgcagagtccatcagagcaaaggtcaaggactcgaaagagcttggcttgttttaggaacagagagaaagccagtgtagttggatgataagtgaaaaaagggaaaaattgtctacggtggagtcagagaggcgggcaggctcccagtgatgcaggacccatgggccacagtaggatgcttggaatttattccatgtgcagggaagaccttggaggattttacaccaggaagtgttgtgatctccagtctctgcaggcagacttcttcctctaggttatgttgccaacaaggagcatctggaacagactgggttgtttacgtagcccacagcctaaaggagtgttaatttaggggccagtgtttcagatgaaacaaaactctagggtttccacagaacaacaagactgaaatggacagtgagaggtcaccttagctgaacttctgactttaggtaagaagaccttagatccaagtggagcatctggactatactaaagatctgcagaaaggggaacttcatcttctgtcttgagaccttccccgagtatatagaaggcggtgctctagatactgaacttgcttgaccacttcttggtctggaggttgtgcttgcgtcatagagtaaacctcatccaaaataagaagacattacagctttgagtaggtggcatctcagggatttgcatttgtgtgcagtctgtcgtgtgtgtgtgtgtgtgtatgtgtgtgtgtctctatttatctttgaaaaaaatatttttgaagatgccttcaacattttaacatagagggccggggcacggtggctcatgcctgtaatcccagcactttgagaggctgaggcgggtggatcacttgaggtcaggaattcaagaccagcctggccaacgcggtgaaactccatctctattaaaaaatacaaaaattagctgggtgtggtggcacacgcctgtaatcctagctacttgggaggctgaggcaggagaattgcctgaacctaggaggcagaggttgcagtgagccaagatcatgccactgcacttcagcctgggtgatagagtgggactctgtctcaaaaaacaaacaaacaaaaaacaaaaaaagcaaaaaacaaaaacgtcagaaatgcctggcatttctgatgaggtggcattgtatggatgggactagaatttgttttgtaaactcatcaacttgcttattttatttgaatgctctttataaactaatactcatgttaacccattgaaattgatttgtgtcacctaagggatgaaattaattggttgtttgggttaaagccttgctattataagacactgttctcttactttgacaaaaatattcagagttcatgaatacattgatttagcaaaacccagtttgaataacatggtaaaccatcactaacgcactgactgtgtgtgtgcctaggtggctgactatccctctgtaggttcttgacaattcaagcctaacagtacagatttgtttgtgtgaaatgagcatgggaggcatttagttgagcactgtgatacagtgggccccagagagcaaggtaataattgtgaaagaattccatttaagctgcacaagtgagtatgatttggggaagaaaaccacccttgagttagtttttatttataaagagcatatttgtttctcaggtggaaaaacatcctcaaaccacctttcttcgtgaatgagttcagaaaagtctaacagccaggcgcagtggctcacgcctgtaatcctagcactttgggaggccaaggtgggtgggtcacttgaggtcaggagttcaagatgtgcctggccaacatggcgaaatgccgtctcaaccaaaactataaaaaattggctgggtgtggtggcgcacacctgtaatccagctactcaggagactgaggcaggagaatcacttgaacccaggatgcgaaggttgcagtgagcagcctgggtaacagaacgagactctgtctcaaaaaaaaagaaagaaagaaaagtttaacaggacaggaacacaaggacgagggtagtctaagggcaggctttgtggtgcaccagcggtagaggatgatgagaacagagtttccatatctaaaggtgctgaactagagaactctcaaggttccctcacatcaacgttctgtagtttggaaaaaaaggatttttttctgctctatgagttagaccgtgttttcccaaggccttatagctgtgagtgcaggacgactctaataactgcatcagaatttataaattcagctgtcagcattgggatggttgagtcgactgaacaagcaggttttctttcattgtctgtttcctagatggatgaataacaatttcagcctctccactttgttgtaactctgtcagtctgacatttctgattgctcagaggtttctggaaattttctaagtcacacgttggagttaattcaaagagataatgcaattccaatggaatcatcagtgtctctgctgtcagatcgagtattttaggagttcagttggttgagttgcacagctctgcagatttaatactacatacttgccgctttgcgtcttgccctcaagtcttcataaatgggctaaaggtctgattggaaactgtgagatgaattatatgtttactatgccaagttaagtaaataccatttgaaaggattactagagggtataatcaagttaattgctttaaaaatcttttttgatttactgggctctatgaaaattgttaagcaattgatctgccatagtacatgagctgaagaaagtggtgctgagtccacaaggtttccatgcacatcccctcccctgtgtctggaactgctccctaaatgagaagagagtccccctgagacccgcatgcaagtactgtggacagactgttgttcctccagagaagacacatgttgacagcttgacgttcaggctgatgatggatttcttttttttttttcattctagatgctgaagaataccagcctcctatatggaaatcatactgtgagtacctgaaatgaaaatctccccagaagtcgttagcaggccagcctttctgaacaattcttgccagcgatgtagtgcacacaagcgttcccacctcacagcactgaaaacccaaatctttctttccactgaggaaaaagattagtcagagacgattaacagagccccctcctcttaccaaggcctccaagaaccagctgtggcccatttcaaaaatgcttagaaaagaggggtggactttctgactctctgcctttcagtttggggctttatttttatttatttatttatttatttatttatttattttttatttattgagaccaagtttcactcttgttgcccaggctggagtgaaatggcgcaatcttggctcaccgcaacctccatctcctgggttcaagcgattctcctgcctcagcctcccaagtagctgagattacaggcatgcgccaccatgcccggctaatttttttgtatttttagtagagacgaggtttctccatgttggtcaggatggtctcgaactcccgacctcagatgatccgcctgcctcggcctcccaaagtgctgggattacaggcatgagccaccgcgcccagccacttttatttatttttttacacagttgatcggcaaggacaaatgtgttgacttctatgaattatgtttttggccaatcattctaaggataaaatatcatatgacatcaatgctgaaaaatgaacagatagcgaagaacctgtttggtcaccaagggtgactcttagaaacagatcctgcctgatcatcagttacccacctagctcccctcgtgaaggcaggcggctatcattgcctaagccttgtctcctcttttcttagtactatatgcttgactcaggaactccccagtgagagagggcaggactgtggtaggaggagcccactgtgtccagagccagggtgcgcaggccctggctcaggctctgcttctgctgtcatcattagcattcctaacgaagctgccagggttaccactccccatcaagaacctgccctgtgctggccaccgcaccaagcagccaagtcccgaattcttaccacaactctcacagatgggactatttttttttttttttttttttttttttttgagacagggtctcgctctgtcacccaggctggcgtgcagtggctcaatctcagctcactgcaacctccacctcccgggctcaagtgatcctgccccctcagcctcccaagtacctgggactgttaaaggcgccatcacacccagataattttttgtatttttattagagatgggttttgccatgttgcccagagcggtcttgaactcctgagctcaggcaatccactaacctcggcctccgaaattgctgggattacaggcatcagccaccacaccaggcctatgtagactgttattatctcatttcacatgtaaggaaaccacggctcagggaggctaagtaacttggtgaagttttcacaaaaattagtggggtagcattctgagtggaacccacagcctgcacgtgtccaagacttgtccattctattcagaatcttatatatacctatgtgcatgtatacacacacacataaatacacatattatgtatggatatataatatatacacacagccacacacacacatatataaatatgaatgtacgtatttgttacaaaagcaatacaaagctacataaaagacagatattagggaaatacataaaacggagagtaaaaatttcccaacatccacaaattccccaccccatattccagtccactctctcctttcccagtagctgagctctgtgaatgtggggagggagatccttctgattgtttaaaagtgcatgcttcatgttaggcatttttgttgttgttgtgtaaaaatggcttgatgctgtgtccttcagcttgcttgtttcacttcacaaacatcttgtttttatctctccttgtcagcacatacagaggcaccttgttcttcgttacataagtctgttcttccatctgtgaaataaaggggctgtgctgggtctctaagggcccttccaatctaatgctctgtattccgatcttctactttgaaaggccgtgctaatgacttagtacttggatgtttttgtttgtttgtttcctaatggagtgtgaagagctctgacagtaaatcaacagaatatctgtagtgagaggcattgggtgttccatgacttactgtgctttgcacactggctcgcgcatggccttgcgtacattaacgacccaataaatatttgttgagagaatgccaccaccgaaagctttgctgaagcgaaaagatggcattggctcaaattcattttgccttcttctaagagaccttgggccacccagtaacatctcttaaaagtacttctatgtcttgaggaagctggaaaatccttgctacttaaatttaacagtatcaattttaacccttctgtattagttttaagtttgatttttggatctaaccaagttgtgtgttttaaaaatttgctctataatcataaaactttacttgcaaaagttcctctttattatatccaactaatagtcctccaggctctatttgagagcatctagtgatgtagctctccaaaagtgaggggagtatgccatccacggcatcaaaaacatgttgaccaaagccctacagaccaccagtgaggaagaactctcttttggtcatcctggatccatgagttatttgagtttgggtgttagaccacgtatgaattatcgagctcatgctactccatcttatttccaagaatatcatccatttgtttaatctttcagcaaatacattctaaatgtcagagaataagtgttagaaatcaacaatgaataaaatgtggcttatacttccctccaatgtacaatctagtcaaggagacagatgtaaaccaataaacttaaaatgcaaatgaattctggtaacaaaatgctactcctctatctcctgggaaagaagactatagaagaggtcaaatttgcatgtgggtcttgaaggatgactaggagaaggaatctgagggccttcatgagatgctttttaaaaaatccaaatatgctaaaatgataccatttcttgatatgaaagtccaacaaagctatcagaatattgaatttgttttattttaaataaactgttggtaaacccgttgtgaaccccagaaattaccaagcctttctctttgaaatgttcacaaattatcctttgagaggttaattttagatactgatgtctaactcattatatcatgtatggattccatattcttccatcacacacttttttaaactctagcaattttcggtactatcaattctctcatatatttactagagacagtatatttttgccatagcataggacttggtttaaaaatttattatttgcaatgattagacaagtaagtagctatgtccttgttttcattgacgtttttttggccataactttgacttatttaatgtcagattcttgttatgaagcactagccccaattatggcattattcctacaagaaaatttgtcttaaccaggcatggtggcatgccttgtagtcctagctactcgaaaaggctaaggtgggagcatcacttgagcccaggagtttgaggctgtagggagctacgatcacaccattgcactccagactgtgcaacagcgagaccctgtctctaaaaaaaattttaatttaaaaataaaagaaaattagtcaatttctaatgatgatttatttatttatttatttattttcttttttgagatggagtctcgctctttcacccaggccggactgcggtggtgctatctcagctcactgcaagccccgcctcccgagttcacgccattctcctgcctcagcctcccgagtagctgggactacaggcacccgccactgcgcccggctaattttttttgtatttttaatagagacagggtttcaccctgttagccaggatggtctcgatctcctgacctcgtgatctgcccgcctcggcctcccaaagtgctgggattacaggagtgagccaccgcgcccagcctaatgattgattttaagaagcggtttctacgttttattcttggctgcaagcaacagaatactactctcaatcacattgattgacttaagccaaaagtgcagaggcattggcttcagacatgactgttccagcaactcaaatgacattaccaaaatccagtgtatatttcttcttttcttggctccgctttcctagatttcaccctactcttactatgttcttcccttgggatccccctgtaactatcaacaatatcagggctgtgcttccttatccaaaagcaacaggcaaagagacagtctactttcttgacacatctaacaaagtctcggaattgagtctcagtcttaattgacctgggttacccattcctgactctatcactgtggtcagggatgtgctgactgccctaaaccaatcaggactcactactggaattcaggaaaggatcaaccccatataaccctgtataacatgattggaaaatttggagtaatattggaaggaggaagatgaaaatggatgctgggaaggcaaccataaatatctggctaagaaatttagaagggtaagaaatcagctctctcaatattttatataaattatagtgttcattaatttagtcactccttcattcaacaaatgcatattaagtctctgccttaagccgggcactgtgcttggagttgggccactaagatggataaggtcggctgttgactcaaggaacggtgatgccacgggatggcctttaagtccctgccctctctgttcctttccttttcttagaaaaggaaaaaaaaggaaaaagcttcatggcttactgagctgtttccataaaataatcttgtcccaaagtatcatacatctgcagctaattcttaactctcaagactgaatacaagaaacattgatgacgtcactgagaaagctttggtttcaatgctctaaaagaagagctactttcaagtttacttaaaaataataataaagctacattctaaactttaagccagaactgtatgaactttatgcctcgagcaggcaagttcaaaagccaatcaccatggttatgctctgaaagattttctttcttaagaggccaagtgccaattaggcagcagatgcagtggctgacagctctccctggaggctcccctgggcagcaggtcactcaggcatagcttgtgcctgttttacagatttgaagtttagagcctcaaaaccctgatctgcagaatccctgcatcagaatcccttggggaggatatttatgataattattcctcagccttaccccagatctctggatcagaaaagtggggggatctgcaatgtatcaaaccccacaggtttctcttatacatacttacgcctgaaacccctcagtgtgtgggcaactgtcatctcctcctagaggtttttcacagtgccattagacaagataattaaatccccattaagactcgacattctggccgggtgcagtggctcacgcctgtaatcccagcactttgggaggccgaggcaggcagatcacctgcggttgggagttcgagaccagcctgaccaatatggagaaaccccatctctactgaaaatacaaaattagccaggcatggtggtgcatgcctgtaatcccagcttctcgggaggctgaggcaggagaatccttgaagccaggaggcagaggttgtggttagccgagatcatgccattgcactgcagcctgggcaacaagtgcaaaaccccgtctcaaaaaaacaaaaaaaattgacattctgttaggaaggcaaggccttcccatggcagggtggagggtggggttgagccaaggaagacacctaaagcacctacaattccctgcttataaggttttcccatgaaaatcgggaagacatgagcagtgagcagggtcatactggctcagcgtcatggccaagtgcctgggttcagctcctgggtccatataccctccttagaaagaagtagactgttagaagccatccctgcaggatctcttaggagctgatggggctggcctgggcttcaaggccacccaggctgtgggctttcacccattagccgtctgattctgttcccagagtgagtcaagttttcttactgaagaaaaagtaaaacagtctgtcagtgagctcacaatttcttaatctgctttgggtttcttggggagttagggagctccacctccgtgttccccagtggctgccacccctgccaaacagcttactctggtgctaagaattctctggtgtgcggcagagggcccggggctgggaattcctggcacatatttgggacattgctgcagaagtaattccatcacgtcacctctcagctcacagaccacccaagaattgacatacattattgcatgtgacttgtgaaatgtgtttgttgaacaaggaaaattcaagaagcaacgttttcagattatgcgataaatttctgttatattcaactctgcctcagagatttttttcatggatgctatagctaaccttgaaaatgatgggcaggctctcatttgaagctaagagaggagattgggccttatttttatatggttgccgtggtaattgattgtcatctcattatctttatagccagccaggtaacccagatggcaaataggcttctgtgcctacttgccaacttctgttgtttggaacagcatagaacagggttttgcagattctgagacctgctcattgagaaataagtcatcaaataatgatgtctactgccgaggggccaggagagagaggtggcagttcctcgcttctggggtttgccttccccttccctcctccaagtcgcccctggctggggattgttctttgttggttgtgagattggtgaattaccaaatttttctttgctaaagctcagagggttcctagagaatgcagctatgggatttagcctgttgacataggagaggaactgtccagaaatgttccatcacctgcatcctttatttgtatagtagcatctcaatctctcagccgctcagggtctctttgtaaaccagtcttgttgattctcttttgaatctctgaggccatcaactcaccttctcatttgcatttgcaccagtgttatcttaactcacactttcacaacctcatctgtgtaccagtaaaacactgttctctcttgcttccttgtctccagtgttccccatgtctgatccctctttcagcaaggcaaaggacagtggctcctactcctggatatgcatgagtctcttgaagagctttaaaaagaacagatctgggggcccctggccggactgggagagtaagcaatgccagagatggagtctaggaatctgtattattttataactcctaggagtttctaatgtgagcagctcctcatgggacctctccaccatctagttaggcaaccactggctgaggctgaaaactacagcctttgggttttggaaatcaaggcaatgaatcttcatttcatcctctgatctgtgtgaccttgagcatcttcaaagctggcaggcaaccccgctaccttattagtgaggggaataacagttaccttggaagctttttgggaagatgaagtgagaagatgcatataatatgcctggcacatggtctgtgcccagaaaagggcagcatttcttcttctgaataaccttatccctattaccaatattttaaaacagagtagatcatggctcctgctcaaacatgtgactgtccctttgttacagacaggaggacagtcacggtccccagcatgtcattcaaggtccagccccacatggccttctcacacatcccacgccctggctcagcagccacactggcctcttgctgaccagtcagctcatcatttcctttccctgcagttcctctttcctctatctgtaactctctctcttctctacctgcagaacccttctaatccttcaggagagctccctgcctcttcccttgggaagttgttctgaccacttgagtacattgaatagcttcctcctcttcccctattaaagtacttggcccaccttggttttgtgtctccatgcatgtcccccatcactggcatctcctcgaaggcacagattgtgacccatgggccattagatacagtctgttcattcaccaaataattaaaaatgtgttcacaaagccacttgagccacacttcccatatatcactgttggtttcaagaggcattaataatgggaagagaaaagtgaacaggattctctcgctgtggattctatagtccttcttagatctggaactctgtgattctaggagatggcccctttgactcctgttacacacacactgtcagtaacattctgctaaaaagcagcttagtagtattgggctgattcaagaggaataaagggacacatatgcattaaacatgtactacaaggctgagcgtggtggctcacgcctctaatcccagtgctttgggaggccgaagcaggtggatcacttgaggtcaggagttcgagaccagcctgaccaatatggtgaaagcctgtctctacaaaaatacaaaaattagccaggcatggtgatgcgtgcctgtagtcccagctactcgggaggctgaagcaggagaattgcttgaatccaggaggtggaggttgcagtgagccgagattgtgccactgcactctagcctgggcaacagagcaagcctccatctcaaacaccaccaccaccaccaccaccatctactatgtgccaagcacagttctagttgctggggattctgcagtgcacagaacaacatccctgccctcaaagagcttacattttaatcaagggagatggtacacaaaataaataaacataatatttatttcttgtttattaattgtgttaatgatgatgagtgctgtgaagaaacttaaaactatataagagaacagagggatagggtggaattttatacaggcaagtcagggaaggcctccctgataaggtgaggtttaagcagatacttgaatgaagggagagagcgagccatgtggatatcttgggaatgagtaatccaggtagaaggaacagtaactgcaaaagccctgaggcatgggagatataaaccagggaagcagggttgatggcacccgcctgtattcgcagctacttgggaggtggggacaagaggattgtttgaacccaggagtttgattccagcctgggcaacatagtgagacccccatctcttaaaaaaattaaaccaacaaacagaccaggggctttggaatcaaaaggctgtatgttagctctatgtcctggagcaaatatttaacttctctgcactgtttcctcatccctatccagaatgataatgacacaaagttattttttctggtttcttaagaagattcaatacatgttattcctgacacatggcaggcacttggtatgctggtgcccttctcttctcccagactctccattcatcctcaaagcctccacataatgctgactgtggtatcttgcatatagcagatgctcacatatttgcttgtaagaattgcaaaagagcacttagctaaaaatgcttctcttttataacaggtatgcatcctttgccacctccattaacaatggtattcacaaagccatttcaaccatatatcactgttggcttcaagaggcattgacaatgggaagagaagagtgggcaggattctctgaatgtgaattctgcaattcctctgtgattttaggagatggccattgcatgctcattaacagtaacatcctgctaaaaagcagcttagtagttttgggggtgattccagaggaataaaggaattccatgcagcctccctggtgattaaggagggcacgagctatactggggtagccagaggaatgtctacaactgtttctctgtctttggccaactcttcctcacgtattaaaagaagccttctctgactttatctcttatagctttttctttttcttttgaataagcaatacatatgattcaaaactcaaaacaacataaagtatacattgaggaatctttgtcccattcctgtccttgtctttctttttattccctgaaggtaaatgcttttattacttccttgttccttctagagtttctttatacagatgtaaacaaaactgaatatgcattattattttactccctttcttaaaatgaatgtgtactctatgtatttttggttgtgtgtgtgtctgtgtattttacagtgctctttttgcttaacagaatgtcaagagtattgttccaggtcagtgcatagagagctttctcagtcctcattacaggggcatggtatccatcggaagacgtaccatagttaatttaactatttccttctaacagagattggtaaaccaagccttgaaaagatgatccctgccagccctgtacttactgtactatttcataaaaacatttgggcctctcactaaagctgatagggttcttgaaagtagaggctgtggttttatttatatttatatccatagcacctcagcaaaacctggagatacaagacaaagcaaaaacaagcatgatcccttccttcgtggcaggacttacaacatgcagggagaaatcattgtttttggaactcacatcaataaatacagaactatagttgttgataagttatataaaggaaagtacaggggattgtaagagcatagactagggtgatgtctttggatctggtgtgagagatgtcaagaaagactccttcatgaagttgatatttgaactaaggacatgatgataaggggcagataacaagaggtagagaaggaggagaggaagatgtcatagacagaaggaatagcatacgcaaaggccctgaggttgaagggaacactgtgtatttagggaaaggggaggaaaccaacttggctgagcagagagcatgacacatggtaacactgtagaaggagacaggcaaaagcatttagggcatttgatcttcctctgagagcaatgtgaggccatgtaaggcttttaagcaggggagtgacatggtctgattgatattttaaaacagtcactctagccaccagggaaaaaacaggctgcagggtgggaagagtccagaacttggagtagggtgttaatgatagtgatgaagaggagtcgacacactttggagatgttacaaagcaaacgtgacaggtctgtcgatgaactgaccatctgaggtgtgatgaacaacttctaggatgctggtgtctagagaaataggatgaataatggctccttcactgatctcagaattcccagaagcctagatttggaggaaaagatcctgagttcaacttttgacatgttgaagttgaggtcccttttcttttgagaaaatcaggaggaatctgtaggaagtaagatatacatcctggagcttagaggagggttctgagcagagatgtgggagcctttgtgtgtaggagataaatgaagcgttaggggtggaggagattccctagggagaagaaagagaatgcgacctgaagagggcctaaggtaagccttgggcctctcctatggtcagtggacaggtagaagagaaggaggaggcgcagcaacatgcataggaaaaaggcagccaggatcaaagggtgaagaccaggagggtggtgccatggaagccaatggaaagagatagcacaaggtgaacagtaggtgccaattggttgatgatcttatgtgcaaggccattcatctttcctcccactagtcccactttccatgtattggttcattgggatctgaaggctcttcctctacagggaggcaggtgtgtagaagccttctttttatctgtcatttttagtgtccttctgagctaaagggttgtggtgaactctgttttcctttcacagatgactacagtcatctttaggtgacacattagtgtgggtgacctatacttagaaatgtggtacatttcaaaatgtataaagggttagatagctccttctctgtgctaaaaccaggtagtctacactaattaggtaagaaaataaccacattcagccaaagacattggggagccatagttacaaaatatattccatcatttttatctgtgtttccatatgatcactacccttcaattacattttttatttttagacctaaaaatagatcagaaagttttgcttatcttattacattttctagaaagactttatcagatctagtctttttaactttttgtagatttattccatttaaaattaattatttcctcttcaggattctgaagagaacatcaactttttttttcaacctgtattttcacagaagtagaatccaaaggtacctgcttaggatagcttttccctttagcagaaataaacagactagctgagcagcagaaaaatcactcattatgttccgaaaaatcacaaataattgtctgatagattgctttatatacaatgacctgccttcctccttgcctaagcctgaaagtctgtctttaaattaggttaggaaggagttattattatttaagatgagaaagggcctaggaaagaggaatgacaatggatgggaagtcatcaaatggatgtgaatttgcagtgtgatagacagggggaaaatggagggagaaaagagagagaaatggcttggtgtttcattcactcacagaatcagttatgtctttgtccataactaacatctcagagaatcacactcctcttaaaatgccagttcttttcctggtatgtcaagagacatcggcatttaaattcaggaatcctattatatgatcttactactcaggtactcacaagtagaatttcatctttaaaatagtcaaaagaattttagccatatttagtcttccacgaaagccataaaatgaacaatgccagtaacaattatgaaactaaattggccttataagaataaaaaaatcaattttgcaagtttatattcacagtgactaatttccatataaataatctgactttttccagtctaaaaaatgtgcctgtattctcttgtttttttatatttacaatccttgagatgtacttaggtggaaatatttgaaggcacgttgatatgtgttgcagtattctaattctaattatttctctctctctctctctcttttttggcagtatatcagttacagcaagaggcacctcgtcccaagagaatcatttgtcctcgggaggtcagtgctcagctatttccaatacaccttgttaaatatgatgaattgtcagcactatgtagagagtggagggatttcaggtttcctgggagttgatttctattaacatttgttggagtgtcaaaaaatttaacatcttcataatctatattttgacatcagacattatttaaaaaatactaacaaaccaacttggactcagatgtctcatatttttaaccattgccgagacaaattaaacaacctttgtaaacaccaaaaaatgtgtattctggatgttttctttgttaatatccttttgattcttttagcattttttattatgaaatgcttacagtagagaaagtacagggaataataaacttctgggtactttcaacgcccatatttagtaaatctttatgctttgtcatatttatatgacattttaaaataataaagccttacaaaaaagtgatgaggttttaattctaactttccttagttcactaatcagttctctgattgtgtgggatgccagcaagatttgaaaggcaggactaaggctctattttctttttattctgatcagtttctttaatagcatacttaatatccttcaaatcaaaggcccatgggtccttgcttacttttgctattaatgggattaaatatagagccacggatagcttttaaagtgccatgcatgccttatcaagggggaaaggctccaattccaacactcttgagattcactcttgaacattagtactttttggatctggttttgaacctgtttcaaagacttaggtacctgcatacccatactcagagccaagttatcatggtttaatacatttttctacataaaattttacatctgttgaagggcaatgaaatttatcaagtcatctcaattttagtacacagtagactttctcatcctaggcatgtggctggagaggaggaaatatctggtgcttaaggaaaaatccaggatgagttccatttatttggtactctgatcttgtcctgtcactaactctgcggtcaatatattcaaataatatattcaataatatgttatttgttattcaataatcaaatccaatgatattcaatattttttcaaatgagagaaaataggtaaatataaatttttgaatgagatgcactaaataagggtgttctcagtgtgaattaagacacaagttgctaaaatttccttcactcctgctttttactgagtgtttctccatcagaaaaattattgccatgtgtaaggaggtagaggagtttaaatgtctcaatgaaaaaaaactttgtaaaattagaatacaactaaagactctatctaggggcattaataaaaagacactgggcaagatcaggcaccagaacttgaaatgcaaacagatagtaaatagtcattcatttatctgtttattctgtaaatatatatggagagcctactgtatttcagctctggccttgttgtggggaatatagcaaagaacttggctattggcattttgaatatcataataaaagacaacaaaagtatgatgtaattaaatatatatttaagattttgtccctgtatatgtatgtgcgtgtgaaagagacagaaaaagagagagatagagagaaaaaacctctcggtttctcaaaatccttggaaccatgtcagttgcccttaaggcaggtggagtgttagcagtggaggtaggcgattcggattatcctcttacaaactcttcctagagttccactgaaactcttcaaccatccagcgggctgagggtccactgcatgtctgtttgctgttgcagtgccatcaccatctgctgtgactaaagaatatggtgcccatgtctcttgtttcccccttgtctgactgttaaaccatgctcttcaccttttgaccttaccaatttgatatattagtaagtgacattggttgatgcttgctttcctctagaattccatatcccatttctgccacgaaacctaacgtgaaatggagattcatcagctccctttcctcagcaggcagcatggggcccatctagccaggcaggtgtcagatagtaacaggtcaagtttgctggaagaacaggtgctgctcagatgagtgtctgcaggagtagcttcagttccctttgttctctagttggtcctccagtgtgatgttaactgcagatagttcctgcctaaattcccaagcctcccaggagttggcctcctgcaagtgaaggcgccactttctcttgcatgatggtgaaacagttttcccctactacagacggtgcttagtcatacgtcttgttgtcttgtaacacacttgcatgcttgggagacatgcctaatgaagacagaaagcctttctgtgtgagtttgtggccagggagattgaagctttatttacatatttacataaagcagtaaaggctgtttattttaaacaatgagttataattttttctacgtacgttttcctattacatctcatccgttagctaagagcccgcatcttcctcttctacgcagctctgggccctttttcttggtcttcaatctatctcttcccagctactcttccctggtccctagcgtggtagctccagtatactcaatctctgttgtttctctgatgactcatactttcccgggccatgggcctctcccagattaggacctgccagttcaacgtgataaatacccacattagagcaccaagcaaagtgtgcaattagagagatgtggaacagtgtccctctaaggtatagacgtaggccagtctgccttgatacatggtggttatcaacagataccaactacttagtagactttgctgcagagctgggtgagtcaagggtacagactgattcagcaggcaaaacccacatacttagcaaatccaggaaagcagggagctcagctgcaaagtcagcttggacttgttttgacttcttgctccaccactttctagctacctaacacagagccaaccacttactctctcagggagattaaggcctaacctacagataagcatctactttgcagggttgctataaatggcatatgtgggtcaagtgtccaatacagtgcctgctgcataatgggtactcagttaatgttcatgattcatggcagagtcagaaacctgtgaagaacaggctctgaactggtcattaaggacagagtcgaagtgatgacagtattctctgaatgtaagggtaagaggcagtgatcaagaagaaagcaagatgcccaggtccggaattaagcaaccaggaaaaaagatactgaggatgaggaacagaaggtacaagcagctgaacaacagctctggcgccaattaagccaggcaggatcaggtcgtgaaataacagttcattgctttcttgaagctttactactgcaaattaatatttattgggcagccgcagcacctgatgctctgctggcacttcctgaacactccatgccgacagatgcaaaacatcttcccatatgcagaattctcactgctttttccatcaactatcagtcagtcacatcataagcatttattagttaccaaatgtgtgcctgggttgtctgtcacaaactgtgtggaatgttgactctcaaatttgtttctctagccaagacctctacccggggctccagacacctctatccacctgtccactggacctcctcaggccaccacctgtctcacaggccaccaccagcctcatgttcagaatagaactaggccccgctccattggatgacacctaacttcagaaacctgtacttctcccttccctaccctcacccctttctcctccattcttagcatcaagtctatctccaaatatatctcgcattgtccactgtactctatccccatgaatgttgtgtggtttgggccattgtcatttcttgcctggatttcattgcaggtaaagagcctcccacctgatctccctgcttccactccttgcagcttccctgcagctcacatatacacacacacatacacactccagtcaccagacaggagcccaaatcatcatcgttaaatataaattagacccttcaatagctttctgttactcttagtaacaaatttcttgccgtgcctatgagccatagtttgcctcctgtgtctgtcactgccctgtctgtaccattcttctccaagtgcactgccttttagccccactagattctattcccattcattaaaaaaaaagaaagaaagaaaaagaaaaaagcactgtcactatcactgggcctttgcacttgccctttgcctgaaattctcagacccaggttctctgcacgtctaggtttcaggtcaaatttcacgtaataagaggcccttcctaaactccataaaaaagtagcacctccccaacccttggagcgtctctgtcatattgccttgtttattgtatctgtggcactttatatactctctgatacactttcttaacatatttgattgttgcttgtatatgcctctccaggagaatacaacctccagagacttcatcagtcttaatcatagatatatccttagcagtgagcatagccaagcaacagtggggaatcagtaaataaatcagtaagtttcaaaatgatgaaaaaaaaggatagcgattgctagcataaggaatttgggattctcaaactattactaatagcatatcagatttactcaatgctgttattaggatagtgagctagacttttggcagttgttaaggtactaacttaaacacagactaaaattttttcctggactaatccaagtttcttcttggcctctccaaaaggccaaaatggcaagatttacttgtgtgactcattgaaagtcaagttgccctaaaattacctcaagcctacactaaataagcagaagttcttttgtgactgtaaatgatttggtgtcatttgtcttttttgaaatcgctatagtgaatatgggattataaaaagcaatttcaaaaaagggaaatacaatggcatactattatttcaagttgttctccattttatatagcttcatttccttcttgctgtggaatagtctattttggaaaacttttttaatgcaaaaatggatggtagagatttctagcattcatgatcagaatcagcttttttcttgatggtcagaagttagaccaagtactgatggcagtggccaatcttttttttttttctgaggtggagtcttgctttgtcgcccccgagctggagtgcagtggcgctatcttgactcaccgcaatctctgcttcccaaattcaagcgattctcctgcctcagcctcctgagtggcagggattacaggtgtaccccactgcacctggctcattttttttttaagtagacacaggcttttaccatattggccaggctggtcttgaattcccaacctcaggtgatctgcctgcctcagccttccaaagtgctgggattatgggcatcagccaccacgcccggccggcagtggccaatcttaagttggagtagtatctcactaccttattttaccttccagtgaattgtattcattttttaaacactgcttaagtattcctaccctcttttatgcagttttccctagtttttggtgttctaaatatctactgattttactcttttctatctttatttctaaaaactgttcctgtaaaccttcgaaagcattccatttcttcattatgctttttaaaattgtattaatcatatctagacttcacaatcttgtagctcgaggacatttatcttgtcttaggcacgtctggaagatcttaacaggccatattgattgaccatatcattttcaactaactcagtacattttgaatcacagattttaaatgaactctaagggattttctaccattccacagttctcccccttttcttcttttatttattgaaataaatgttttaaaacaaagtgcatttgggggaacgtgaaaactctactgatttaagacatctcgacaaggtatgtcttaaagtaatgagattgattctacaagccacaaacaaaaatcaatctcattaccttttaattggctttatgtgtagtaatcagaaggctatttcttcccttgcagaaaaactattccttttcttttcatcctagactttctctgcttgtctctttttttcccccttaatgccgacacaatcaagaatgaaggactttcccatcattattcctccacgctgtcatctcactcactgatgctgtcaggcctttttcttgatgcagttttcttctgaactggacttgctttgggtttagacctgatgtagtacaggggaaaaatctagtaacaccaatgttagaaataaaattttgacatatgaatttttttccctaaagatagaaccaaatgttttctgctttttttttaaaaacaaaaaactttcttttttattgacaagtactgtgatctaccaaagtgcatactccccctgcctccaaattcactctctttggaatactttgaacttcttctaaaataatacagatccccgcaagtatgcacctagaacatatttagacatttccaaggtgaggtcataagcgcttgggtaagggctgttgagaccaagctgttatggagttcagagccaaggggagcaggtgaggtgagctggagagggccaccagagaacagtacatatgccaagacataagatgaggcaaaagtagaatgaggaaagtaaatgggaaattaaacagtgattgataataggcaaagtttccggagaagattcttcaatctctctgggtgatttttatttctttatttccttccttccttccttccttccttccttccttccttccttccttcctgcctccctccctccctttctccctttctccctttctctctttcttttttttttttgacggagtttcgctctcgttggcccaggctggagtgcaatggcgcgatcttggctcaccgcaacctccgcctcccaggttcaagcgattcttctgcctcagcctccctagtagctgggattacaggcatgtgccaccacacccagctaaattttttgtatttttagtagagatggggtttctccatattggtcaggcgggtcttgaactcctgacctcaggtgatccacccgcctcagcctcccaaaatgctgggattacaagcatgagccaccgtgctcggcccttttttttttttttttttttttttttttgacggagtcttgctctgtggcccaggctggagtgcaatggcatgatcttggctcactgcaacctccacctcctgggttcaagccattctcctgcctcagcctcccgagtagctgggattacaggtgcccaccacgcccagctaatttttgtatttttagtagagacagggtttcaccatgttggctggactgatcttgaactcctgacctcaagtgatccacccgcctcggcctcccaaagtgctgggattacgggcgtgagccaccgcacctggctgatttttatttcttaacatctcacttgaaaaggtatattcccttaattagtagagttggaatactatgtggtattgttcattgttttagaaaaaaagaactgatagcatcgtgtgttacaacatgtgttctgccatcctcctctagcctatgacagctggaacccaagatcccattactcattgatctcaggtggtggtggtagtgagagtgtggatccaaactgagacacaattgttatgcggaggtactggcttttgtaacaccaaccttactcatccaaacacagagcaaatgtcacacctccataggagttgctacctacagcagccccatattaagtctgctctgtgactcagaggtcaggccccacaagttttggggtgtaaccagggttatccaggaaaaggagcaggtgcataatgctggagctatagtgaggatttaaagacatgcttcacattttgctcacctggttaaactgtaactgagaaataatgctgataaaggcaggttatactttgctccagataagccatgtctcctactggcgtgtggcctgtccaaccaagcactgagaggcttggacgtagatttctgaccttgattctgctttccattggaaaaaatgtggatgatgcaatctcagacagcctcaattttaatatgactatgctgaatgatattacctaattatttacttgttgtcagtcttttaatagaaatgacagctatcacatatggagtacttcctgtgccctgagcaccggcttcagagttttatggatgctacgcccaccacaatcccatggggcttgttatccctctcactttacacaggaggaaatgagacaggaagcacaagaggggcaaaggccagattccaacccagatagttcatatcaatggctgggcttctaatccagtgagtcacggagtgtgatcccagcatcagctgggaacaggtgagaaatgcaggttctgtggcccatcccacacctgaattacaaaccctggagatggggcccagcaatctgtgttttagcgagctcttcaggggattctgatgccgccttgggtgtgagaactactgttctaaggactgttcttgcttctctctgctttctatttcatccttcctccctaatcccttaggatagaagactcaagatgcttttgcctcctggtaatgcttgctatttgctcagcacttgtgctagactattcacggatttcagtgtaggcacccatagccttccttatttttcccagatgtacttcctcccagatgttattttccaccctttaaaaatattttgtctttcttctttgctatttctaactttcctgtactcttttatgttgcagagaccaaatgtgaatcctgcttgtaagggtggggtcagtacttgattaagcctgatctcctccctctaccctccattttctggtattatacttctaatgttatgtttgtgttactaattaacaaagctatttcaaattcaggtttttttgtttgcttgtttgttttattttgtttgtttatttgagacagagtctcactctgttgcccaggctggagtgtagtagcatgatctcggctcactgcaacttccgcctcccagtttcaagccccctgcctcagcctccctagtagctgggattacaggcatctgccaccatgcctggctaatttttgtatttttagtagagacggggtttcaccatgttggccaggctggtctcaaactccttacatcaggtgatccatctgcctcagcctcccagaatgctgggatcacaggcgtgagcgaccacgccccgcctcaaattcagtcttaatatgatgattcatgttcattcatattcagcatatactattatgaattccagctcttttgggatcttttaggtgttttccttatctgtggctatgcatgaatccttgctagatttccttctggttttaatgtcctcttgccttaatgaaaatactaaattcattatcgtatgtcagaaatgctttaattgcatttgttttccaagatgctagtttcttcactcagtccatcctctgtgtgcttaatgagcatttctcaattcaggattttagataacgaatttgctaataaaagccagtccagagcaggtggtttgggcaaggcccacctccttgcctcagtctaccactcgcctggcatctggctgatgctgactgagccattggtaataatcttctttggctatgtcctttagcaaatcacagtctcacttgacattagttctaagtacaccatgtctctgtcttgttggacggaaaagcaagctctgcttcaacgatagtatctttttctttctccttatttacatggccagtgtcatttcctcatcttctgtggaaagaaattaaatagccttggcacagcccaacaaaggcatatttggttgccatccagcaccttgcgtccttctaggtaattacacatcgattgtttgatgaatgttcttggatctccctgggtatttctaccaagtctgtaattacactactctggttgtccttttgctctgtcatggttctcagggttccatggcttctcaaagaccaggcttaatgatgtttcatcaacacctttcaagtcaaggatgcagctcagactccttagtgtttcattagtctcagttgcttaaaaatgtaattcagccattttctacctcagttcattgtgatttcttaagttggcatcagtatgccgtagcttaaaaattaatgattctctcctcccagtgcattaaaagatgaaagagcatgaacaaggaatgatttgacccaccattaaataaaaaggcctttgaggcattggcaagctctgtgttttgagctaagaataagaggtcctgaaactggtttttggagaatggactctcatgctttttcgtctagcataggcgttggtcagctatatcctggagactgttttggtaaataaagttttattagaacgcagcagtactcattctgttatatattatctgtggctgctttcatgctaccatggcagagctgagtacttgagacagaaactatatgatcccaaacctaagatatttactttatagcccttgctagaaaaaagtttgccgacccctggtcttacactaaaagtaactttaaagagtgagttaggccacgcgcggtggctcatgcctgtaatcccagcactttgggaggccgaggcaggcagatcacgaggttaggagatcgagaccattctggccaacatggggaaaccccatctttattgaaaatatgaaaaattagctgggtgtggtggcacatgcctgtagtaccagctactcaggaggctgaggcaggagaatcgcttgaacccaggaggcggaggttgcagtgagccgagatcgcaccactgcactccagcctggagacagagcgagactccgtctcgaaagaaagaaaaagaaaaagagtgggttaatatacataaagcacttagaacagtgcctgacatttatttatcagaagcattggtctttaatttctaccatctcccaagtactacataaatgttagtggaaaaaaaaggagtttcagccttggaatttaggatgaatttgatcccaagccatgttgagagatgacttggccttcatgtttaacatgcataaattaatgaaagaggccaaagcagttacaagacgcaggtgttctttgaccttctttctgatggtcactttctccacttcaagagatggaagcctgttagcaaaggtggcacagcactccatcagcaggaagttaaaggggtgcgtgggatctgtttatttggtagcaacatctgaacatggaagctaaactgacttaaatttcaggaacaaagctggtgttagcctcctatatgttcttgaattctgattaataatttgtatgccaatgcctttgaggaaagagtgctacatctgcagttaactctgaagtctattttttaaaagttggattgatggatggatagaggaatgaaaaaatatatatgctgtaaagcaagaatagtaaaaatgctgtagaacctagatgatgtgtatatgggtgtttactgtaaaagtctttcaacttttctgtatgtatgaaaattttcattataaaacgtcaagaagaaaaaatgaagactgtgtgagaagagtggcaggatgtgctctggcccatggaacaaagacattctcttgggtgcacagccctgacaggtgggaggatgacttggcatgagagctgtcgaaaacactataagccatgctcaagaatttttaatgtggaatagagaacttttctgaaaaagcatagttgaaagcaaggacaagcattaataaggcacttctactcttttatttattaccatgttgggaattattttgggaggagtgcttgcttcagaaatgctaaagtaggtaatttgtaaaaaaaaaattaatagagaacaggcttctggattttatgtaatcattacaatatagagcaatgagtgctggccctgatatcaggaattgggttttaactctgaatctgctgctatccctgggcaggactgtgggcaaattagttaatcactctgaactgcagcttccttgtctataagaagaaggcaaagatacaattccaccctcctggtgggagaatatatgtaaaagcattctgaaggtcatgacgttatcagtgaacaatgagttctcaaagggggcaatatcacccctaaagtggagaaatttggttcttaccaaaaaaaaaacccttactatttatatgtataaagcacaaatacctatatagaacataaacagatatacagtctatatgtaatattaaaattcctttgtggggaggtgcttgagagaaaacctgtctaaaaaggctccttagggagctataatgcaaaaacagacaagccttgaatttctaccatctcccagattctgttctcctttctttttctttaggtagattaattttatccatcactttgaatacttaatactcttacatttctaggagagagagaaaaaagtaacttctgggagaaaactaagaatgatagacactttgccttttccaaagtacgtatagtaccacttaacccaaataccattaagctttgatggaaggaatttactaacaagagtgaggaattaaatgagtatactcacccaatcttttttcctctagaaatttaacagcagcatgagttttcccttgatttgattcagttctgttgggtacttcaagctctttgggcttaaaaggtatgtggagaatttaaagagagtttggaggagaataatgaagatgaattaaggattggaaattgggacctattagaaaaggtcaaaggcacaaggattatttagtttgaggaagaacaggcgatctagtggcacagagatggcttttaataatggaagccttattctgtagagaatattctcagattctcatttgcactgaagaccaaaagaaaggaagatgcataattggaagctggaggaacataagattagatgtgaagataacatttatcttcatgattaaattctggattttgagtctcctttacagtatttcttattttaaagtaaaatccctgtttggtcgatcagaagtgtggacaagtcagcccatcatgtttgattctctggccctggttgggaggtcagccagccagcccagccaacatggcctcctggggatctggcttgatgggagaaaacattcatttcacctggacctgtggctccaggatgccaaagatgagtacaaaaaactctagccaacagagtgccaggctcgtgccagaaaagtatgcctaattgggttgtccaaacaaggagggcctaaggcagattttgagagccaacatatggagccaaggaatcacggtgccaaagaagatgtagcaaagaagagtgggtgaaagtgagctgctgggaagaagggctggatagaggagtgccactcatggctgggcttttgggtgttcctggaagcccactgtgagaatggatcaaaatcaatgggaaggtgctgccaaggtgtcctaagcttctaggataatatttattctctcagggttttggaactgctgcccaaagtcatagttctcagtcctgggtgtgagtcagaatcacctgtggagcctggcaaaccttacagacaccctggctccagccctggagattttgatttaatggaaatatcacttagaattctattgtaagcaataaaagtctattctcactaaactaagcaaaaaaaaaaaaaaaaaaaaaaaaaaagcagggcctaggagggcggaccaattgtggttagaaggatatgaggaaattccctggatggaaagaaaagctggtcagagggcttgagaaaggatttgaagcaagactgacagaccttgggcaataagaggtgatggttagcgtcagagttccagggtagtccaacctgccctttgcaccttgcttctctgtgcctcagttagtcctctggaaatggatataactgatcttacctcttgggtaatcatgaggatcgacagggttgatatatgtaaagaaagtgcttagaacaatgcctggtacataagttctcaataactattaatgattattgttgttattaggctctgccatgcatgtgaatcaactcttaacagtttcatttaatggtttctactcaagtctcaaattccaggggcagagcatctgggtggcttatgttggttcacatgttcaccctctaaagaatgtgagggacttcgattagcagaatcactggctcgaagtcacagttgttgcctgtggtcttcagtcttcactctggagattcagaaagcagacaggggaacaagttttgtcccgtagcttggaagcataaagcatcaaggtgtgagctaccaccaatgccagtctttccatggataccccttttgaaatttcagtgagccccagaaagggatctgggagcataagcaaacctgcctttcacttattgtgttatgccatgaggctgagctctgtgaacaccgtgagcaatatgctgggacagcagaggtgaagaaacaggagcccttccctcaaggagctcacattgagagctcataaaagccaacaatcccaatcccagtaagatcgccacggccctaactcaggccttttataaagttcagaggcaggagacttccccaggatggcagcatttcagctcttacttttaaattaaatcagtgagattttgccaggctaaggcatagagagactgaagaacaaatattagaattccaggcagaggacataaccccaccaaataatatcctagaagtatgagcagccgagggtgtgcttcagaaactacagaagctatgtatgaggaacatgaagaactgaggggtgaggatgtcgtggggcaagagcatgtgtgtcagtaagaacatattctggacacacaagcaaggaccatccagggaagatcctagatgctattcatgtgttcatccagtaaatacgtattgagcccttgggaagggccaggactgttttagactctagagatatagcagtaagcaaagcacagtaatctttgcccttatatagtttccatttgaatggaagatattggcaaaaaaatgtattcatcagagttcttcagagaaatagaaccaattgtatgtgtgtgtatgtgtgtgtgtgcgtatgtgtgtgttgcaggtggtgtagttggaaggcctgagagctctcgagctgatggtgttgattccagtctgggtctgaaggtctaagaaccaagaataccaagggcaggagaagatcggtgttcctgctctagcagtcaggaagagggagcatgaatacaaccttcctctgcctctttgttttattcaggccctcaatggacaggatagtactgacacacactggggagggccatcttctttactcagtcattgagtcaaaggctaatctcttggagaaacaccgtcccagacacaaccagaaataatgtttgtcagatatctgggaatcccgtggcccccacaagttgacacataaaattgatcatcataacacataagtaaaatatatagtatatcagatgatgataaatgtcatggggaaaaaatattccagaaaagaaggatggagtatgccaaggaggggagttaccacttttaaggagggtggtctgggaaggtccgactgagttgtgtatgtttgaccatgcagcagtggggaaacagtgaagaattctaagctgagagcaatgtgacaagacttgcattttctgacttaagtgtgaatgacagattggaaggtgataaaaggatatagggagaccagtaaagagactactttcgtagtctagatgagtagatagcccagtggacttggagagaaagggaccgttttaagagcaattaaggaattgcatacaatgaagaagacttcgtggcagattgcaagtggggttgggaagagggaggagtcagagattatgatttctagcttgggcattgagtgggtgatacgctggatggtagcattcacaggggtgaagagcaaaggaggctgagccattaggtgtgatgagtgtgatgagtactaatcagtctacccaggtctccagaatggccatgttttagggttttaacaattttcatatcaacccatctgtaacagcagagtcagtgttctctataagtacattatatctgttatccttgagcaatttcccttccttttggtgtaggaaaagattatgggctttggagtcaattagaccttggtttggatctcatctccctgcctctgcatgatcttcaagtaatgttaaccatacaggccttctttttcccgactgcaaaatgggaatgacagtctccatgtgacttgcttgttgggagacctgaaatacccacactgaaggcacttgttaaatgttggctcctcctctgctcctcctggccctccccttagtggagttctgggtcaaggtcaataggactgaactgggtgaagatcagaaccagtagcaaaagggctcaatgcacgagtcatgggtatttgtatgagtgtgtctgggtgtagttgcccttgcattacttttaaaatataaatataaataattttgtcaatttgccttcctctgttatgatattaatacttattgtgtgtagtgcttatgtaatgaaccctgagaaaacatgacttctctgagccccgtactggacagccattagacagtgctttagccactccttcctgagaaatcttctgtgacctgggaaagctgtgagtggtggaagttttgtttccaacccagcaatcagggcaaaatttcaaagctacatgctgtgaggtgtggagtcccatagcagtaaggaattcaaacattaattcacatgtatgcatagcatggctgatcactcccaagaaataaatttcttctttagtgttttttgtagtttaacctcgtttaaaatttttccagggagggaggaggttcccttattaatcttactgacattttagtctgttccattttgtattcatctgatatatttccttaagtagttggaggtctctcaccagtactgttttttcttaaaagctacctttataaattatcagcattatcaaaagcaaatatttccttctgccttccttttactccattttacttaatgtatttaaagtttttgttgcttatttgcatttttggttaaaaaaaatgtttctaatattcttccttgggaatacttaacaattcaaagttcttccagtctaaagcagggtttattgaccttggcactattgaccttttagggggataattgtttgttgtagggggttgtcacatgtactgtgtgatgtttattaacatcctggattctacccactagaggccaggaataccctcccccgagtcctgacagtcaaaactgtcatgaggcaaaaaataagccaaagaagagggacctggtatgctaaggacaggaggtcccacttttaagtagggggatctgggaaggtcccgctgagttgtgtaggtttgaccacgtggcactggggaaccagtggggaattttgagcagagaacaatgtgacgagatttcctcagactttgacaaatgtcccttgaggagcagaatcacctcccctcccagttgagaaccactggcctaaagaaaatattttatgtttgtttgctctaatattatcactgataatcataatttctggaaaattttgggggcagaagtgaagccagaaaataaaccaaatgattgggaactgcttttgtctcgagcacccctaagctgatctacttgtttgcatctgtaagttcacagaatgttttgatcaggttgctaaagtatccaacttgtgtgtatgtacagaacttagcaaagcaattggtcaccttttaaggagatttattacagaaagactgaccagtggacatttatagtacattctaatcaatacaggaaggaattcacctcatcagtgccctattcgatttccagaagtgttaaagaaatgccatgaggaaaaaattaggccttagattctaaatggaaagaaatgggagattttagagtctgctcaattttcattctatgctctgcactttgactacaagagtgtaaatttcagtacttgcattttctttctctccttttcagtgggggaatctttgatttctaattaaaaaggaattatctgtatttattttttgtggatgaaattgccccagtatcaccagcacaaatccccccatcaaaagccttttctcccctacttgatccatctctcagaaaatccggcaatctagctgccctgtgtaggaggctgctaagtcgggtttttaaattatttctattaagtaaaaacttaacatataccagctgcggagggattacaaaagctttgttctttcaataattggaaaccttgtttacagaggactcacaatattctgtaaatgtctttgtgttgaacataaaggaacttgtgtttatctaggcaatgataatctgactataaagcaaactcatttaaggattatgctttctgtctctcactgtgcagctgtcaccctactgttctttggagcttggcaaaatactgagaagtcttccttaaaattgaaaaatacattgggaaataaaccaggtagtttgggaatacacgtgaatccaaatcacagggaaatatttgagagaccccaaatgtcactccatcctaggcaaatttttccgaagttcacatttgccaattcattgatggaattcagttcattcaagagagattttaaggtctcgagtcctagcaaagaaaactgaagaccattcagataatctaatgtatttagtcaaactgtaaattttgagagccaacaaaggcattagcgctgattagtatctactggagaaggagtgaagcacagtacttaggggtggtccccatctaggctcagccacttaactagctctgtgacctcatgctatttagtggttctctttaaaataacagcactcacttaccttggagcattgtttagagacttaaatgagacaaaaggagagaaaccctcaggactctgcctggcacagagtagccactcaataaatgagaacctattgccacgatggtccaagtctcacatgtgggtatctcatctaatctgtgaaacagccttattaaaatagctcatttttataaccccagttttactgaaaattgagaaaaatgagatgcaaaggagtgtaataatctactcagagtcccacagtaactggattgatgagcaagggtccacatgcatattctgtgtctcattctgcaaacatgcaatgaggacaggcactcttgttttccgaatactcactatttgaatatttgctattgggacttgctaaaagccattcccaattagaaaccagctatgacacgttctctcatgtgtggcagcttctcaaactttaatgtatctatgaatccccttagaattgcagatcccacatttctagcaaattccaagatgatgccaatactgctggccccgtgatcacactctgagtagcagggtgctgaaagacaaagggtgggcttctctcatatctgtgttctcctgatcctgtttaaacatatagcacattatatctgtaatttccctaccttttccctgagggtttagcccttcagtatttgtttaggccaggaccctaggagcactaccaactcaggtccaattagatagtaactttcgaatctttggtaatatcactgcattatttatttttattataatacatgctcagtgtagaaggctaatgaaattcctatttattcagctgtagactgcacacaaatatacctactcattactgcattaagtgttaaacaattaggtaattgttttttaagtgttttatattgtgaaaagattgctattagattgtcaggtaattatttaggagcattttagtaatatttggaaaatggatatttttgcattctctaaaaatgaattttgttttctgtgtaaagtaatggaatatagactcttgctgtttgaagctttgctgcgctatacattttttaggaatgggtgagactcagataacaaggggtagctgcatttactctgtgacagatattggcagaaatcctggaaataggtgaatgatgaagacaaaattgctgctccacagaacagttaggaaaaaaatggcaaataaatatttaaaatatggtgagataagttttctaatggagacatgtaaaaggagctctaagaacacagcaagggatgggcctaacccttccttctatacagaggagaccttctcaggatcccggtgatagctcatagcaactgactggctgtctgcgccaggcactgttgcaagcatattacacatatttattcatttactcttacaacaaccccatgagacaggtacttttattatcattctcattttaaagataagaaaactgaggagtatagaaataggtaacttgcttaaattcccacagatctggcctcaaacctaggcagtttgagtccagagcctgccgtcttaacccacatgtgatctggctcatttgaaagataattcaggatcttaaaataagaccacgtaaaaatgatagacatattagagggcacacacttatggcctcatctggtttgatgagtgcagaggatgaacataggatgatgagaccattgggctgaaaacataacattcgcatggcctcatatatataggagcacggtgtgtggactgtggatagtagggacaggactgagcccatctccagtagtcacagtgctaacaatttaattatacttgagatgtaactataaagtcataacatggatgttattttaacacatctgttacatgggcctggtcccttcccttcagtcaccttgggaagctctgctttcatttctgccaagttcccattgctcagagcgtgttgggaacgtctcttctaaaattcccattgctcagagcatgttgggaacgtctcttctaaaattcccatagctcagagagtgttgggaatgtctcttctaatattcccgttgctcagagcgtgctgggaacgtctcttctaaaattccttcagagcaagtcacaatgaaaatcttattctcttatgatcatgcctcgtttttgtctcgaatgtttttcctagtttggtcactcaccccgtttacttactggtcttggctccaaataacttatgccggtttgctgaaataacatgcactctcaaatccattctcaaaaaagtaaatgtatgtatatttctacatacagtgattctgactttagtatatgctttaaaatcatctagggggcttgattaaattacacgtcatacctctaccctcagtaattttggttcagctggttcgagatggggatgctgtctgcagtcttcaacaagcatcttgaagtttctgttttgaatgaccagtccacactggtcattttgagaagtgtacctttaaggatattcacaagaaagggtggtatatattaaggtagttccaaaacagaaattccaaaaatgttctggtcaacagggatataagtggcatgtattgtgcctccttggggtgactattctcttgtagatgatgcttatttagaataaaatgttcagttttatttttaaaaagaatcagccggccaggcacggtggctcatgcctgtaatcctagcactttgggaggctgagttgggcagattgcctgagctcaggagttcgagaccagcctgggcaacatggtgaaacccccgtctctactaaaatacaaaaattagccaggcacggtggtatgcgcctgtaatcccagctactcaggaggctgagacaggagaatcatttgaatccgggaggtggaggttgtagtgagctgagattgccccactgcactccagcctgggcaacagagcgagacactgtctcaaaaaaaaaaaaaaaaagaatcagccaccattctgcatggtcacaccatatacagtgaaaccctctgtgccttgggaaggacccatttcatgtgttttctcactcaatgacctcctacttggtgctctccctctgtaaagagaggtgttcctttttgagccagctggatcatctaaggacccagtattagaagaactagtaatccgtgtaacacgactacatattttctttctcttaaaaagaatgagctgctttcacttcttggagtcagagcactaaatcccaagagcagacatggccgatccgacagccgtcagtcctactcacaaaggccaggttcaccaggtgatggattgaccagctgcagctgctgtcctaggatagtcacagtggcagggaagctccagaaccagtcttcattcttgtcatgatatattgcattttccattcctttctgaatccatgtgactgcctaaatttttttattaagttgcctgattttaacaaacatagttttcaatgagaatgcaagaagaatttctgagttgccttactttttatttatcaactatcctgtcgccttcacacctactgaagagaatctcatacaattggaaacagaaattgagttacagtttctttaattaaattcagtttcacaggtgggtcctggtttccactgatggccaacacggagccttgcccagggagtgagtcaggcttctctaaggcactgctgggggcacagcacggaggttcttagtctcttggcagacctttgtccctgggagccctagcccccagccacctattctttctggatctgaggatccagtattatccaccttgaagaaatgtagacgttgtatgatttgtatagcaccatttaacttaaacattaagctctttactggtttaaagcttagtgaagtatagaaatagagactgtgtttagactcctgtgagtaaaaagtttacaaaaagaagaggattttgtttttttgatcccagcctctctctctctctttgacattaacaaggacacatatattttctttacgagcttcagagacaaaaaaggaaggagagattggattgctatcaaaatggccctcaaccagtagaagcagttatcagatggccaaccacatcctctatctttactctctcttacttctgtctttcctatcccctacatagggttgccagatttaggaaagaaagagagagtggggaagagagggagaaaaggagagagggagggaggtaggaagggaagggaagaggaagggaggggaggggaggggaggggaagggagggtagaagggaggaagggaggggagaagagaggaagggagagagggaaggagggaccaggatgcctagttaaatttaaatttcagatatacaaggaatcatgtattagtatatatctcatgcaatatttgggacgtattccatggccctcttccatgcctgtcccacacaattcagggctcttcttttattttctagtggttttcattttcagaagatttgtccctcaattggatcaaactctcttctgggcagaatcttatctggcatctttcaaggcaccctaaatatcagcttccctctttgggggtctatgttagatttctccttaagcgtttccctctgctgcaagtgcagaacacccctgagcgcctcatacctttcctctctgcacctgcaaggtcattacttcatgcacatggctggcctgagcctagagcccagaacataagggtgctgtgtatttttatcattggttgatgaactgaaagcaatttgttgtcttgttaagaatcaattaaattcagcatctattaactgtttacctgcatgccaagagttagtagtattaccatgtggctcatctgggaagttagattagtaactctttctcttttagggaaataagaagatacaggaagggaatagggttgagagctacacccagattttgcaaacttgtgctacggttcagccaaaaagatggaaatttaaaaatcgtcctcatatgtagagaatcacttcaaattttggaatatcgcctctcaaagaatggagattttgccattatatatcctcaactttcattggcttttctagttctaaatttcttctctggcatgttggttttacagtcacatgtctataatattataaaactaaaaaagaactttgaaagccgaaagactgatataaatgacaacatattcaattctcattaaaaagcttaccagcctgtagaataatggcacacatcatttatagaaaggatatcagataaccaggtgcctttttacacactttctgcttctattaatgatattatttaaatcttccttcacaaatgacaccgagcaggctttgaaccttgaagattaagttatggatgtcctgcttggttgagtaattctcaggtgtaaaatgcacaggagagtgaacacatatttagaagtgtctagatgataagttttgtaccagcgaggcttgtcctaggcagcattgtgagtgtggtccccaaagccccagctccgcctttctgagcctcttcccctagctcctagtgtcctgttacctattcagatctgcatcccttggaggatggagctaggccaggaaactgccccatatcatgaaatcctgctactgtgcctgtctctgagccctgctgtgaaaactgtccatttgactctaggaagaaatgactgtgaataaaacagctgccaagctcgtatcctacaacagtgaataaacataaacttgctgtcatacatagaaccattcataaaaacccataacttaatgtggctctacaatgttttgagtgtccctggagttaggagagaagaacaaaggccgagcatgagaaatcatgtcactttctcaccaactccaacatcataaacatgtgaaaacaaagctcttatgaaagcagatgatcatgtatgtgagaaaaatcagatgtgataacctcaaggctaaagctgtgattgaaagatcctttctggaatgtttgtgttttagtcaagtcataaatcttgtcccctgtagcctgcacctctggtgtcaaatgaatttcagcccattagccacatgttgaaaaaataagaatgttaaaatattgattttatttagaacatgatcaagttaagtctgctttattttttaatccaggtagacttcttgttttaattataaatacataataaaaacaattaggcacagagtaaaataaatgcttatgttttattcatgacagagtagttgttttatccttcaggatgaagccttataatatccttacaaattccttaatattaaaataagcatcgctttgtttttgttgaaaattctcttattggatgattgggtttgggtgggaaatgagcctaatgattgattctaggtcattcctacctgatactggaatgtgctgattataactccatagcttcatggatctctgatttggaggatacaatctgtaataaaattactaccaggaccctagttctgtttatttgaatagcatttttatctagctgatttgaattcaaatgcattattaatttttttttctttttaatataggtggaaaacagaccaaaatattatggaagagagtatgtattatactattctttgttttaataatttaataagtagtcatttcatgtgtcatttaaatattacaaattttctaatatatggtcatcatcatatgtctattgtgcaagagtttaatgataataaatgcaatcagactcctttgaattaatattttttatagtagtcaagtgcttggtttccattaatgtgggaggtagagcattttgcgctacttttccctccacaaaagagctactgagtgcctggcaagtacttgaaacggaaggcagcatttttcataatggaggctctctgttagtgtttcatttcactttctacctcaacacaatagaaacgtttggtgtgtccaagatggtacactgtatgtgagttcctgactttcgtgtacctcggtgcggtggtcaggataggcatcccacttctctgcagtctcataaaacccaaatgatgatatctcttggctcgggtgtagtagccaaattgccttaatactcccctttccatttttctcttaatttcaactcttgttttgtttcactttttccaaaacctactgcccagcaaatacgcatgaccataaaaataattcgcagtctaagcctatggtgtgtacagcacaacacagagggcaggcagaacgggccaggggagaggagatgcatcaatcacttttcttcccaagtccaacctggaggcgttgtgaggcaacgtctcttttgagtctaccttccaagctctcacagccaatctcaaaccttcctcttattcccttacccgtcagagcctcatcttcatgattaatgaccctcttaggggtcccagccccgtgcaccttcctaattgccacagctgcatttcagaaccttcctcgcagcaccctgggaatttgaccagcacctctggaatgcctgcctgggggcactggcctccgctcctctctaccccatgcccctactgtctaatctatgttgtagtatggctttttttcctcagtatgcttatttgttttttccttgaagatagcacaattaatttaaaaaaatagaagaaaatgaaaacctaccatatacacttttgcatgtgaattctaaaaggagctgtttattatgcattttctttttgcagaaaagttttgtcaaataactttttaattctcatcttcttacccccaattcatgtaaaacatatgagagtcttgagactaaagaagtgttttcttaactaccaaaaggaacatcttttattagatggtaattagcctaaaaccttcagattctgtgtttccctttatttttttaaaaaatgaagggtgtttttttcttccacttaaaaagtaatacatgcttcattcaggaaacgcacatacacatttattcctagaaggaatcacaagaaactattgacaatggatacctttagggagagaggaattttgcatttttagttcttttataccttcaacttttgaaattggaattttctgctgtgcacaggtattacttctgtttctaaaaataaattatggctgggcacagtggctcacgcctgtagtcccagcactttgggaggccagggaaggcagatcacttgtgctcaggagattaagaccagcctgagcaacatgggaagacctcatctctacaagaaatacaaatattacctaggcatggtggcacatgcctatggtcccagctactcaggaccacaggtgggaggtgggaggatcacttgagcccagaaggtcaactgaaccattgcactccagcctgggcaacagagtgagaccttgtacaaaaaaaaattaataaattaataccaattaacttggaaaattagaaaataaaggaaaatagaagagggaaaatacccatagttctaccatgaaagagaatcattgctaaccttttctcttcatctctttctggtctttgtgcatgcttgcttttttcttaccaagttgcagtcatacaaatatattagatattataggttggagatatttggacttttaaaaatgatgcataaaggggatgacaagccacagactggtcttcaggtgcacaaaattgtcattttcttcttttgaatgattgaatttaatttagttattgacactgtttgacgctgtcaatcacttaaacttgccaattcaagtgaattaaaacttaagttctaggtgactatagttaaaacaatttattatatattccaaaatagctaagagaggctttcgaatgttcctaacataaacaataaatgcttgaggtgacaggcatcctgattaccctgatttgatcattatacattgtacttatgtatcaaaatatcacatgttctccataaatatgtacaataattatatatcaattaaaaataaaaatagaaaaagtatgcatactcaaaatcaagaattaaaaaagaaacataagacttagctgcttttgactgggcacagtggctcacacctgtaatcccagcactttgggagaccgaggcgggttgatcgcctgagttcaggagttcgagaccactccgggcaacatggtgagacccgcccccactccccgcatctctactgaaatacaaaaaatttgccgggcatggtggggtgtgcctgtagtcccagctactcgagaggctgaggcaggagcattgcttgagcctgggaggcggaggttgcagtgagcgagctgagatcgcgccattgcactccagcttaggctacagagtgagactctctccaaaaaaaaaaaaaaaaaaaaaaaaaatctagctgcttttgggttaactgccttgtttagagactaccccttttcctgtcccttctcctggagtgacctggggcaggtccctctgcgtgccctgtcctgctattgttactctggcccacgggctgtgtcttcgacatcccagcttttgtcttttctacttatgtgttggaatattggcaatgctgtctgcccctcccactctcctgctgcatgtccctccccccacacccacccccacactcactgccaacccacccgccaacccatccgcaaggctgcccccagggctctttgcccaggccatctgtcccatcctctccaacctggctcaggctgcacaggaggctcctccgcaaagttcctaggtccagtgacctcactatcaaagctccaacacctctgctccaggccccaataaactggcctcccggttccaatccacacctgctatgcagggccagttagaccccctgagactgggctctgcctcagtccctcccaccagaaccggggattcacagaacattcatcctcactcagaagagcattgctccaagacctccagacatcagctgttgagatttaaaatcaaaatttgggaagccagaaagcctttttcttccaggccatcactgccgtacacctttaagaagcgattttgaaacacaaagccacaggctgcttctgacctcactttccttggacagaagcttcagcttggaaggtctactttttaaggatagagggaattaggaaataaatattgtgataggcacttttaaaaatgttatccttctgcatttgtactctaacttaatctttgcattcctgaggaaaatacaaaacaaaagaaaatttgtctagcttacttccctttcctcctcttcaagaaagtaaaggtgtttttctctgtccagaaaatttattctctgatttattatccaaagttctccaaggttggataatcctagaaaggggtgttactcctttcccagaagcttgaagtcccttgggactgcctcatttccccaacccagcttgccccactttccatgaaatactggttgatcaaatctccagtcctgtgggaggagcagctgtatttacttaaaggcaacagggaacgtgggctggttcctgacccaactcctacctctccctattcctctgtggagtcactgtccactctctgggcctcagacaactgcctccacatcagagtgatcatgggccagcacacaaccctcccggatatgccacattttccacatgcatgtgtatgggttttaaaatggtagagaagataaatttatctttaaaaaagaaaaataggtacattttctaaaatacccataagctattgctctccaagtgtaaataactggaagaatgttgatgatagctacctctttccagaaaatgagcctctaaaattaacaccaccctgcacctgaagcaagcaggttgctaatcaataaatgtccacttgcaattaggataacacatagttctctgagctgagagctaaattggtaattgctcttctgttatttcccatggttaaaaaaaagggggggggggggcggtggttgagtaacctggctttttgtttcaactttcattttcaacttgaaagcaaagacaatagcagaaagccaggtggactgggcatccttccttttgtttgcctgcttgaatacttgtgtttggagcatgtgaggggtggttccaagtcacttaagatgggcagtagtcaccccccttcttcactcagttgtggggctgtcgattctgggtgcccccaccatccttttaaggctagttctttgtggtccttattctgtatgtggtctgttcagagcattgatggtcttgtaccttcaggtttcatgggatcatctctcgggagcaggcggatgagcttcttggaggcgtggagggtgcctacatccttagagaaagccagcggcaaccaggatgctacacgctggctctcaggtgaggcgcatttcattccttgttttcattgctgtacaagtggcttcactgatgtttgcccatttttaagaattgtagcagagtatacataacacaaaattcatcatttttcccatgtttatgttatgaggggggggtcccactctctcacccaggctggagtgcagtggcacaatcatggctcactgcagcctctgcctcccaggctcaagtgcctcccaccttagcctcctgagtagctgggaccacaggcacacaccaccatgactggctaattttttttttttttttttttgaagagaatggggtctcaccatgttgcccgggctggtcttgaactcctgggctcaagccatccgcctgtctcagcctcccaaagttctgggattacagtcaggagccactgcacctggcctccttttaaaatttttaagtaaaattcagtggcattaagtacattattaatgttgtacaaacatctccatattcatttccagaactttctcatcatcccacacagaaacccactaccataaacaattacccctccctactccttacttgatatcttcacttgtttctgaagcaccagcagtatatcagagtttgtttacatttcctcagccgcagatgctatcggtaggtgtggacactgggactctgatcatggacacacagtaaactggagaaccatctggaaagttagtgtttctacagccacctctgcctgcaccatctagctggccgaggctgcagcgtctttgcctcagctcccagcagcccatgttgaaggaagggctccttcacctggccttgcacgtgcagacctcacaagacctgcatttgctcatggggttctctcagggttcaccttgttgaccccaggaacctgtcgtgagggcagtcatgacccttcaggccaatgagccagtagaacaggctctactgagcctttaccacaaaatcacaagtattaaacatcacaacataagaaagacagcacatttatggcacttttcaaaccttgatcaaatattttctgtcatttgatcctcgccgtagccctatacatttcggggaaggtatccaatttcagaactgaattgtcttccaaaagttcatttgtgaactcttcggaattggaaagccctctctccatagggggaatggtgtccatggaagcccttcccaggcccacaatggtgtgttccatgcaccatctccctattatggctgtgcaatgacactttccaagttgcaacatgtctacagcatatcttaaataatgtaattatgaggacgaacttaaaaagctattatatcatgcgctctaggtgtgcaaaataatttcctatcttcccagcacttcagtagcagaagctggcagttgtagtggggagtcaagcaggggctgtagatggaaggtcagggcccagagaggagggaacctctaggttagattgtggggacactggcaacagctccagcagggagtttagcacaccttattgcttcccttctgctgcaccaactagggcggaaggcatggggtgctctgctggaggtggtaaagatgcgttaacaagggggcatcaggaccaggacagggcatcccttgcagaggtaattgccaggtatagaggagagctggttcccgttaagtaagtttacaggtaacatagttgtaaatcaggcattaccctctgacccttacaaatgagaaggatactgacaatgaccttagtgatttctaggatcaaacgactccatgtgatgtcctggggttaagccccacctctgcctcgttccagtcatataaactcaagcaggaaccgccatctcttcaagcatcagttacctttgcggtaagacaggcataaccattataccgtctcaaagggtctctgtgagcgttaggggaaaaaaaatcacatcaagtgcttagccctgtgcctgggatacactaagtattcaaaaaacgttagctgctattgttatcattccacactgtgcttatttctaacgtggttgtaatccctcattctctcacgggcaggtttggaaaccagaccttaaactacaggctcttccacgacgggaaacactttgtgggtgagaagaggtttgagtcgattcatgatctggtgacagatggcttgataacactgtacatagaaacaaaagctgccgagtacatttcaaaaatgacaactaaccccatctatgaacacattggatatgccaccctactcagagaaaaagtatccagaaggctgagcaggtctaaaaatgaaccaagaaaaacaaacgtcacacatgaagaacacacagcggtggaaaaggtgagctgtgtgtgatggaagcagcctttcgttttaatccatgccgcatcaacaggcgggttaactataggtgcgatttgctgaaatgttggaggagacccacccccacccgaagaactctagaatgttagggccaaagggaccttagaaatcttctagctcaggccgggcgtggtggctcatgcctgtaatctctttgggaggccgaggcaggtggatcacgaggtcaggagatagagaccatcctggctaacacggtgaaaccccgtctctacaaaaaatacaaaaaatcagccgggtgtggtggtgggcgcctgtagtcccagttacttgggaggctgaggcaggagaatggcatgaacccaggacggggagcttgcagtgagccaagattgtgccactgcactccagtctgggcaacagagcgagactccgtctcaaaaaaaaaaaaaatcttctaggtcagccccctcattttacagatgaagcccagaaatgtttgatgatttgttcaaattcatacagtcagacccaggacttctaccaagtcatttgtgggtttatttggagtttgaaagaaaaaaaaaacaaacctccattaatgtattatgatgaaacatgttttcagtcaccatttgaggtgtcactggctccatctttagttccacccagccggccaaatacgtggtatttgtatttgcttctcttaggactgggtgactgcccatgatccacaggtcaggtctcttgaaggtggtcttacttagataacaggtttcactgacagatatgggagcatttcactgacagatatgggaacgtggctatctctgggaagtagaaagacaagctgtcctttgccccaaagttattatgcctcaccaaggattaaaaaactcctaagtgggcaagtatgcaggcggggggtagattgtggcaggaggcggccagggagatctgattttcctctccagtaagttgctgtttgtttgaaaggcaccaccagagtttgctagcagatttttgggatgtgccccttgagggaccatctgctttgcctggtcctatctgtttcccactgaaagaaagtgacagccagccacgccaatcagcccctgcagagtctgtgctgagcccggcttgtcaggcacactagggctgggacagatagaaataagcggataggagctacagccccgccacactgctccttccagtggtcactaatcctagttaaaccggaacgggcctcccgtcgtccagtgtcaatgggaagcaaaggagcctcgggctgatggattcgggactggcattggcagaggggcttcatcagaaagccctgagagggaggagggcggggtggcaccgtggtcccgttggtggagacagggatcatgtcaactgatttgctgattgagcttcagatcctaggagaaccttccacagaatcacatcagtgcagcagctgggcccatgaaaatataatttgccattttctttttataactccagtgtctccaaagcacctgtttattcttttccaaataattgctttgggaaattgtggggtttctgactgtttacattttaacaaaagagagaggacttgagtcccaactttcagagtttgttccggtccagacaaaagccattccttagtctgtttgcaaaatctgttccaaagtaatttagaatagaaaatatgaaagccgaccttcccagccatgacaaatcagaagatgaattgtaaaataaatctctgaagcagtgtttatatttctgaatcagagagcaaagtcactgaaaaggcaatctgttacaaactgcaggatgcacactagaacagctcaaggaaaagaggagagcaggaggagtgtctcttctgtgttagggccgacttgagatcctgggtattgaaactgatatttctagattcttgtccttccctgagagggaagtttggtcaacagaaactgatatttctggacaatattcctatcaggaaacttgtacctcaaaatatgcccccttgtgcagatatttttgtatttatttgtcaaaaataaattgtggaggaaattaataatccaattaataatcactttgaatgagccacccaatatacatttacctttttgggaaacggtaaatcaagaaaatattgcaggaagacaccccaactctctgagcagtttgatggacgggtgtcggtggtgtggattttcttggacactaatgatgtgatgtttggttgtcccaagggacactgggcctggtcacttgctggggctactcattttgttagtagtttgttaagttacttggtacgaatccatccgtttctctctgacctatattgacaagtggaattattaaaggtctcagccttgccagagattctgtttcccttaaaggcagtcagtggtccattgcgatggagtcagtgactagaaaagagggactggaaacgtgaatggcttcactgagaagagtgggtggggggagggtacctgtttgctttgctaagggcgtgtcttgaaggttttaatgagtgaaatgagcaggtttcctaatatttctcaattccagacacaccagcatttccgtttccaggtacttaaatttcgttttctcatttgttttattgatcgtttccaaatgaatccagagagacgatgttacctgtgtatccaagaatactaacgcagtaataattggcaaaaagagattacctactccatcagatttgagtggctcccagatttctctccagtcatgattgttagcagtaaacttgattttaataaccgtagatgagatggagaggcagggaggaaggcagaaaaaaaaaaaaagttgtgatggttagccaatagtgatccgtctccccactgattctttatttagttggatttaaaaacattatgatgtatgtgggccaccattcggtgcatctaattaaaatggtcacatccagtgtcatttcttctatgaaacgcatttcagaacttattccatagatggattatctactgaccttcacatcactgtaagcaacaaaggaataacaggagatttaacatgagctcagacatttagtgttaaacacatttcacatatgtgaactaatttcccattttatcctcagaaccactttgccaggtccgtagggcaggaatcaccatccccatcttattgaaaggctcacggtggcagggtgaggaatcagacccaggcttcctgattccacgctcaaagcttcttaaatcaactgagcagttgtgcctcattctgtgctcactgcccttagtgctttgagcgaacacccttggttttgggccatcctgaggcaagtgatgctaaaagtactcagtatttacatgatctgtttctgaaaacagatcatgtaagcagaaaactgctattacgagctataataactagtattttcttaaaaagtataccctacgaatccaatgcatatgacaacagtgtttttgacagcacatttttattcaataaatatggtttgtcatattaaattgcatctgtgttttagtggggaaaaaatgatccatgcccttaaataataaaagcacatttaagaatatattataccagtttatccgtttcactgttcattatagcagcaaaaattagaaaatgaccttaatgtccatcaatttgagactgcttaaatggattatggtacatccatgttaaggaatatcacacaaccccaggaaaggaatgaatgagaaccctcatatgggctgatgtggaatgggcacttggaatcgttatatggaaaagtacctagcagtgtggtgtgtggagtatggtattatttgagtaaactagtagaaaaaaatatttttattgatttttattttaaaattgtatgtatttattattttttaaagacaggatctcactttattgcccaggctggtctcaaactcgtgggctcaagcgatcctcccatctcagcctcccaagtagctgggattacaggtacgagccaccgcatccagccaaaaaaagctttagcatatatttttttcatgcaaagtcataaatatcccttgaaggatgcaagagccagtatcactgattgcctttgaagaagggaagtgggtgtctgaggggtacagtgtggaaggagatttttccctgctactctttcagactcttggaattttaaaccgtgatcgatgcagtgccctatttaaaaatttaaataagagaaaataatgcgctgtgtattaaattcacatacattaaagcataccctgaataaagaaacattctctgtatggagtgcttatgtcaccatacacacacacacacacacacacacacacacacacacacacacacacacacacacacacggcagttccaacactctgcacccaggctgtttcttctcagctcaacccgatgctgataggacactttcatttctccatggggtctttaacgaagagtctgtgtttagcagagttttactaaaggttggagctgggagagcgtaatgatagcacagggcgcacatcattaactacagtgcagtgtgtctgcccctggcagtggattggctgctgctttcttccttcctggcattgcctcccctgacacacagacccctcagctgtgccctctgggaccctccccagctctcctcccattaaccaccccaccatcaccacgcctttctcaaactgctgccaagccaactcccagagtcctcttgctttcttagggcaggcaccgaagccctctttggtttctactttcttcctgcaaaaccaaagagagttaccttttctggactgaaggccttccaaccttactgggttgtcctttacagatgaactgtttcatcagagaacaacctctcccctcttgtctcccactcagcgttttgtttgtttgtttgttttttctttctaaattattttcttccttcccagctgcccgcctttatatccaaggtggtcctttcattggttgtttcactgtttccatcatgtgatctgctggcctgtcccggtatctttgcctaggaatgattccctacaatgtgcttgaacagaggccgtggccaggccaaggagtgaatgtccagccctcgcttactggcagaagtcttcatacaaggttgagcctgtcccgagtggttctccccagtgccatgctcgcatctcatggctggtgtccccgtggtgactctgtgctcatcagagtgttattgttgttgctgtaattctgcaacagctcttatttgctttttctctaggacagagttcaaattccttacaggaaatttgcagcctgtttaagcctgggccccttggagaagcaaagcctgagactggggtttggtacagatggggaatttggaaaggcatcccagggagaggaggagaagctgggcaggtaaatagaggaggagagaggctggtatatgcacgttgtggagctgatcaccttctcaggagccgggtagaactgcttctaagaggaattgaagtgggagtgtttaacgcatcacctcctgtcccctcttggttgaggggtacctgtgagctgttaacattctccccagttccaggccaggcatgctggagagctaggtgggtgccatgggcatccctggcagcctgtggagtccagtgcagctgtccttttctactattgaatagaacctgccacactcagcctcccctcccctccccgccctggcatgctgcacaccacctttatgagagttcatcaccctgtgtccagcgtcattgttttgatcagtggttctcaaagcatggccctcgggaaccagcagcatcaacatcagctgggaggctggttagaaatgcacgttcccaggagccactgtgtgggggactctggggtgccctccgccaatgtgtgttttaagctttaggcagttctgattcccacctgcatttaaaaatctgtggtttctatgtctgtctctttccccagaggtggatcagtgggaggcagaggctactcctcagcctacttcctaattctaacgccctccacctcactcggtgaagcaagcactgattgaatgaaaaatggatgggtgacttttaaaatgtaacacattgccccacattcaccctaaggaacagcgtatctcaaattcaccaagagggtgcctcagcatctcccgcaccgtctctcagcacgtgctccttccttcactgggctaagatctggccaccaactccttgtagcatcaggagcagcaggagtctggagaagcaggggaatcgtggagaccatctcatgcaacccttctgttttgcaggacaggaaactgaggcacccggctcaatagcttagaaagtatttcagtgacaccaaggaggcttggatagaaaaggatgcttttcagcagctatcttagagttaagattgttgaggccttttttttggatgggatccacaactgtgccactgtggagggggtcttggtcctagggggtggagaggcttggtgacttcattcaggacagtagattcaaacatagtgttacccattgtccttcaccaagcagaggcgtgcattcatttgccaaagaaagaacctgaattgttaatgcagaaagcattatggagctggaaaagatcacttgcattacagggtctaaagaacctatagattttctctgcaggaggttctttggaaataacatgtaactgacatacccagtcttttctcaggattcaagggtaaatgaagatgagcataacttagctattatagtaggtgacaggtaccctgatgatgctgaccagccgacttgctgcccttgcacgcagtcataaaatggggtgggataggatgcagtgagaatggatttaacttagattacatccgctcatgagactgggttttgccaagcattgttttaaaccagaattccctaatgatttgggatttatcactcagtctgagcaattgctgatttggttggcttggtggttctcaaactgactgaaggttggactcactctgggagcttttaaaaaaatgcccatggccgggcttggtggctcatgcctgtaatcccagcactttgggtggcagaggctggcggatcacttgaggtcaggagttcaagaccagcctggccaacatggtgaaaccccatctctactaaaaatacaaaaaaattagccaggcactgtggcacatgcctgtaatcccagctactctggaggctgagacaggagaatcacccgaactcagaaggcggaggttgtagtgagcccagatcacaccactgcactccagcctggacggcggagtgagactcagtatcaaaaaaaaaaaataaattaaattaaaaaatatatattaaaaatgcccatgtttgaccccacctgcctatggaatcaaagtcttcactggtgaaaggcacctgtcggtcttttttggctcctcaggtgattgtcaagtgcagggcttgagaacctgggttagatggaaggggagacgagagtaaaggtgatcagacattttggagcattttctttcaaggacacctgtctcacttcttcccatgcctcttatattcctgaggctcttttatgttgtaaattagaccctagccttctttctctacttttacacaacacgtgagaagtcctctggggaaacattcttcacacagttaactctggtggctacagttacctgtgctggttcagggtttggctttgctccctttccatgactcctttcccgagattattgcctgaaatataaatgatgggaaacaattaactgaagtgggattaaagaatttaatgaaggggcaaggaaaagttagtccctctctcaggggtcagctagtggtttctttgggtggatattagaaagaatctctttttaccagttcctcaatatcggtgttttcaaagaggaacggaagaggaaagtcatcctaatacattcagcgtatggagggatatgatgggccaaacgccaaaccctccttgtccccatccaaaatctctctaggaaacagctaatttagagacacggctcccgagaaagtattttctatgcaaatagtgccatcttgtggctgaaaggagagttacatgctgatgacacaaaggaccaaacctaacggatgtgaaaatgtgcaagaacaaatttttcagcaatgaatccattgagtcatcccactttcctcaagttttatagcacagatcaggctacacagtggcttggggtgtctgttctgtagcctgtgctccttctctgcataagcacgtgggcagctctgcgggcctaggacttgtaaaaatcatcccaggaatctaattctagtccaaaagtgctcaaacttctcggcctcaggacccctctatactctttaaagttactgaggaccccaaagagcttctgttaatgtgggttaaatcttgatatttatggtattagaaagtaaaatagaaaaatctaaaatatttattaattctttcaacataatagtaataaacctattatgtgttagtatgaataacatatttttgtgaaaaataacactgttttccaaataaaaaagtgatgagaatattggcattgtttttacatttttgtaaatctctttagtgtctggcttaaaagaagacagctggcttctcacatctgctcctgtattcaacctgggatatattgttttatttgaagtataggaagaagtctggcctcacacagatgtgtagttggaaaaaagaggagtgttcttatagccttttcaggtaaatgtgggctttaaaatatatactagaccacaattcaacaagtggtagtttcttaaaggttagttgcaatgtcaatcacagaaggcaattactgtaataaaatcagttttgacatcatggactctctaaagggatcttggggatccccaaacattggtgggccacagtttgatgaagagcccagcttttcaagatgtttatattttgacatctccagagtggtgtttgagaggaattgtcccaccacttttatcacctttgactgcaggaggtaaatgatgctgtcacctgggactgctgtacacctatggggactgggcaggctatgatgaggaggcattcttctggacctgacccaccaagcgcctgccctgagcacgacctcagagctcttcccagtggctctcactaggcggtggggggacaacaggctgagtctatatgagttttaattttagggatccctctggggttgttgaatgtttttaatttcatcgaggctttttaatcatgggacttttaaataatttattctggaagaaaatttttataatgtttaaaacagggtagtgtcttgtttatattttagttgggcttaatcgtaggaacagtgttggtagatttagggtgattactttcatttttaaggtgaaattgagctgtttttgtctttttagtaattatatggtggtttttggctgtgagtaaaatattaatgtttgtttattagtctaggtgggatgatatgttaaaaagataaaagacaataatttggataagtatttagggttctcttgattaaaggtttttttttaattaaataggtttgaggtgagaaatggagagtatatttgcattatgtctgtgggtcatctattggcacttagttttttaattggtaagcgttgaaatagagactcttgtttgaggagtcttagcccctcacctaaattgggtattttgttgagtatgggatgtgagattatacttgacttttttgatttgtttttctaattaggggagtttgtctttttttgtatttttgtttttgaagaaactggagggaaaaagttataggagttgatgaaaaagttgaaggagagtgttattattttagacctttgtaaggggagaaaaagttgaaagtagtgagacatagtaaaagttgaacttttgatttataaatttgagaagtttttaaagaatgactgttacatataatgctctagttatttaaaatattatctaaaactttaaaaacacagactttcctcctcaaatccctaaactctcctcccttactccctagccacattaaaaattccccatttctactttttattaaaacaaatttttaaaatcttgccttccccaccttcttactttaatcagatcaaataaacatttctctatctccaaacacctgtgtatcactatttaacatcaactacacaccaagtacacaaacctaaatttagacttcaacacaagcctagggcctgtgtcatcaggaaacagttctgcaggtgcaattctgatatatatggccaatgaggagccaccgactgggtctcattctcttctccgtacagaggaaataccaagactcaaagctcaaagtgacattgaacaaggagggttggaaggaggaaacacaattttagcagagcctattattttccttctttggcctcgtactgggtatcaccctctttgttacctctcctgggcttctccagctaccatctttgtgtctatttcatcaggatgtggcagtctccccaccccacccccagagtgagtagctgtcatttttgccacccagagccacctcagtgtaggagcttctggtggagtcatatctgcccactaatcccagaggtggatttgtgattcaaggccaagccgaaggaccccgtgtccctggctagggtggttggttcaagggtgaccatgtggtcaagtcagagccaggggaagacaacagacttttaccgtgagttccaggagccaggcctttcaccctctttctgcttggctcaattaggcaggaagtagagcctgggctgctgaaggcttcccgccacccgatagagcctgagaatggagcctggagaaagtagagcctggagatggggagagagaagctgagtcctgaggcctgatctgagcttctcgcggagctgcccttcagcccgcccccgtctctggatgttccagtactgctggcagttcattgctgccttgcctttgagctgggtaagcagatgttggtgctgcatttaagtcggcagctgctatcatccccacaagaactggaacccacctgtcagctccctgccacctctgctgtccttcattcccactcaccttacttgtcaccattactgaggaagcttagctattcaagttcaggttcattttaattttaatccaataatccacactacccttctttaaaatggtggtgttaaatcagaaaaaggggacctctagtgtttactgaaatgggtaggaatgtagcatcttgtttaccaggcagacatgggaaataacccagaagccactgctggaatgcagccgtcatcctttacctcctggctccacaacatatatatatgtagacctcttacagttaaatgcatttcagtaagattaaggcgctctgctaaagagtcttttttttttttttttttttttttttttgggagacggagtctccctctgtttccaggctggagtgcagtggtgccatcttggctgactgcaaccttcatctcccgggttcaagtgattcttctacctcagcctcccaagtagctgagactacgggctcacaccaccacacccagctaatttttgtatttttagtagagacaggtttcaccatgttggccacaacggtctcaatctcttgacctcgtgatccgcccaccttggcttcccaaagtgctgggattacaggcgtgagccaccgcgccaggacactaaagagtcttaatgaacctggtaaaccagattctcagcaacttgtgatatttccgggaaacttttttaacagaatgggatgaaacatggccccttttgcagcattggatgtggccacgagagccctctgttggaaggggtatctctcagatcattggtacaacagatgagcagttgggaacctgtagactctgaagaaggaaaggtcaaagttccatttgtagtctttcagaattaaaggcttggcctataagaatttgtaggggtgggtgggtggggtcctggatcaactgtgggaagaagaaggattttgttccctgaataattcccattgccgttaatggaaatgaaactgtcagggctacattggtttgttttcatggcctctggaccaggttgcagaactggcattactcattttgcaataaaaaaatgtctggccgggtcttatgatgatagtttataaatgcccctgttggttttctctctccttatacacaatcactttgaagttcccgcaaagttaatatttcactttgttcctaagtccccatttatgaacttaatgaagtccaagtatcagaagagaaagttaaagtttacacatgcaactttgattgttctcaagtgactcattggtttaaaaaattatttaaaaagtcaaagcactgtcatttgcaagagacactttaatacccaagttgaggattagaagtaagacacagaactgtgggctatgcgtgtcccaacacacctttaacagagtaaaagcagttatattttaccacagtacatataaattccatgaaaataattcatgatataagggacttttattatgttaatctcaaatgattttaggaaagttacaattactccccctagaaagaacattacatgtattaagcatatcattgtttttaatctatcataaactacattatttcattctgcttcatgacaacccttaacttcattgttcctcctcttccaacaaagaaacaagaaacccggggcttgggaaagccaggcgatttgcccagggtcgtagaacttgtgacttgcgggtcatttcacgaacagccagttgctagaaggtggctcgtctgacttcgaacaggctgtactttccactggaccacattgacacagtgagcagatttgctgtgtgtctcattttaaagcttctaaacaaagcgttatattaggaattattttcctcttcccaatatcggtactcagtgtccttgtggcttgattctaatcgtcttctgctctggactgatttgttcttatgaagaaataggtgtggctgagggaattcctcgagaagagatgtgttcattacacacatgcctgcctctgtgatttctaagagaacaatctctgtgtgcatttttagccttgagctatatgaatttgaaaaggattgggcaatactataaagctctgtatacctttactatatcgcaaggtgatgagtctgaaatgtgagtcttcagacacaagcatgtgtctcacttcttccagtcatgatggagtcagttcagatgagaggaaactgaaattgatgttaccctcctgaaggttaggaagtgatgcctgacccagctctctctcagtgtagctttgaaacacccccgaactctgggattgtaaaatgatatacatggagattttaatgcattggattttctttcccctccagtaagttcggtgtaaaaatcaacctactcacaaggaaaggaagaagtgctagcacgcacggggtattgaccacataccacgtgctataggggtggctttcagtttgtcaccttcttccgtcctcacaacggctctgagagttgggaattggagcggtggaagtaacttcttcatgaccacccagtgggcaggggagctgaaaccctgccgccagctgtcctggcttgaaggaaagcctcttcaagagctcctggtcacctgagattgaccaccgcctgaccccagtgtggcatgcaaggccttttctgacccttttcttgtcaccctgtcccccaacacacgcatgcacacgtcgcttcacctcagctgctccctctccctagctgtgtccaagaggccggcaaaacagagcaattcaagttttctgagcccaacagccagtgtaatgcctctcagcctttacacagcatcttccagttctttgcaatgtccctccccattgccttccccaggctcctgtcctgacttggggaactcctgccatgctttgtggaccaatcctgggcatatccttccctgcagtcttccctgacctacacaagcctgccttggttataccttcagttggctgcctctctgtagcttagatacagttctcattgcactgagcacaccccaccggcgtgttctttcattaattcattcatgcttaactattaataattaataataattaaatattcattgagcccctaatctgtgtgaaacacggtgctgccaattgcacttacaacgactagctcgggatgggccagtgacataggttcagtaaggcagctcctgggtctttgctggaagaattaagaaagaagtggactctttctgcctggacttgctaaggcacagaacataaacacggagcgacaggggccacctggctggcacttggggagtcagacatcaaagaatgaagccatggaagaaagctgatgctagagatggagaatgtgttaaaccaagagcttcattctggagaggctcaagtggggagttcccaccttggttttctgtgctggtacatttctctttctttttgttctatgctattttgggtggagtttctgtttcctatagccagaagagcccgaatggagtcctaaaaacaaaaacaaaaacaaaacaggccatgcctggcagagaaggcccttctaaggaagggagtagttgggccagcctcgggacacagttggtggaggggaaggctgcgaggagggagatggccaggttggagaggggggaggctggagatgggcgggcttgggaagggccacataaagtagtctccaaagtgtggatcttatgcccaaatggcttaaggagctgcctgcagtgtgatttttagaaggatacattggtggcagggtagaggatgggctggagacagagcctggggctctgggacatcaatgcagtaacattgaggcatctgcatttttgctttcaaaacccagttgctgtaggcaaaattttaaaagcccgccttttccatttttaaatgatgacactattaccaaagctaattgtcatcttagacttgtaagtgttgaaggcctaagttggttaaattgttttttgtaagttttactgggtttggggagaagagtgggaggaagcaggaaacccattattccacggggttggataaatgcggccccacagagctgcgttaacctacagggcttctgtgttcaagacataaccttctattctgcaaagccctctgccattttccttaaacatacacttggaataagtgatgaatgaattagcgtgtttgcattctttcttcattctgcctgctacctgcaaagacagaactgtagtatatgcctttctcagaaaagctgtggacttcaaatattatctctgttgaattttatcataaaataaaaaatactcattaacctgaacttcacagtcttaacctttagaagctatgaaaaagttatctactaatgaaatagtttaaaggatattgaaatggaaatgttgttacttaagagagcaaaggttttcttccaactcagagtatacactttaaaatggggtgaaaaagggcagcagtgttgaggctgctaatcatgttggctcaagtccagtagttctcaaattttagcgtacatgagaatcctgtagaaggtttgttagtacacagagttccaggccctctcccatcgtttctagtacagtaggtgtgaccagcggcccagcttcccaggagacagccgatgttgctggtccgggaaccacagtttgaaaccgctggcccgggcagtagagtagcacagttaagtatataaggcaactggagaagtaaggctaaatgacagtgattaattagatgtaatctgtaatcatatgcatatgtatgtatgcgtgtatatgtgtatgtatatgtatatgtatatttccagcatttttatactgactctcatagaatataagcaaactgcaccttaggcgttctctaagtagtgattgctttgatgcgacatttcctcccattgtggagctccttgctggcccctgcaggcatctcccctgcagaggaggtgctgcacagtggttagagcgtgggcttcagggccagtggctgtgtggctgagccctcctaagcctccttcccttcctttgcatgccgccgggtagcatctcacctgcaccttcttcgaaataccagctacctctgcagcgcgtcctctccttctggctcccctgccagggccccagctgctcgcagtcctgagctgcgcctcactcagttctgtgaccccgcaggacttgctgcagcaaatgggcttttgtatttccaaggtacttcatcaacatttgttgagaaaaggaaggaagaaaaaaggaaaaggaagagagagggaggaaggaaggaattttcccaggttgctcattgtctttgtgacatttttttactgtaacccttttttttttttttttttttaagacagagtctcgctctgtcccccaggctggagtgcagtggcgcgatctccgctcactgcaagctccgcctcctgggttcacgccattctcctgcctcagcctcccgagtagctaggactacaggcgcccgccaccacgcccggctaattttttgtatttttagtagagacgggatttcaccgtgttagccaaaagtagagaaagatccattaggcagaaaacctagaagttatttaggttgaaccgtaatgccactgttgatacctgataagtttttgatttgcaaaaatcaggcaatttcatgtggttcaaactaatatctatttaatacgaaggtatatgaatcctggtaagaataacacagtttgcaagttttagaatacagtccactaggagtggatactaagcttgcagtttatatgctctggaaggccctctttaaaaaaaattaaggcaaaaatactagtaaggtattgtagatggtgccacggagaggcccctgcctgagagaaccttggaacttgagcatgtgcttcagagcttcatagtaaagacacgtgctaggggcctggcttgaagatggcagctcctaggacaagcacatgtgaggctggagagtcgcttctgaagaatctgtagaatagcacacccacttggcaggtaactcaggtgccagaaatccatacagtctgctgagtcaagtggagagatgaaggattgctggagcgccttgttggttttgaacggtgctatttccaagacaaaatgagcctccacgtcggacagacttcagaggcagacagtttgtcctttcgtggaagttctcacgttcgtatgtttcatgcattttccctcagatgggatgttttggagtggaagtggagctaactaagtaaatgtaagccacaccaggcagacacccaagtagggagcaggaacagaagctgcggaaacttctcgcggaagcgcggggaggaggcatgatgccaaacatggagtccttggcattttcagaaaagttgctgaggggcttgcaggagagttgtgagatccagaaattactatttgactggggagtggtaggtgcctttattgggatgctttaaagaaatcctaattccatagttagctgagcccagcaaacacaagctcatatgttaggagtggatgtccagaaaatgaattctttttttgttttgtttttaaatctggaagcatggcttatctgattgccctctgggcttagcgaaagcatacaccccgttgagtattgtgttctgggccacagcctagctgctacttccctcagtttccctctgtccaggggctaagctcactaagattcattggtgggaggtggaaagaccaggactcgtggtctcctccctcgattttggaacatggaactaccagacctgccaggatggtgcttttttccttggcgtgcctaatttaagtgtttaaaatgcaagtatttttaaacaaatttgacaaccacaggatgtgtcaattagcactctatgtatctggtagctctgccagtctagcctcgtgcttggcgaaactcagcaacatgaatattcattaataagcccataagagggattctgatgaactgaaattctggattttgaagggccagtcaggatgacttctcagcgtaccagtatgcagtgggcacatggtggcagttctttttttaaattttccaagaactgacaactgttaggccagtcttgggtgtgcctgtgtataaagtttctagcaaacttagagtcaactttctggggtagacacctcaaggctttgtttaattgttagttagatagttagaaataatcaccaccaatttacacctagcacagtgttctgaatctactaccagattaaaactcagtctagaggtattgggaatactggatattcacatgcagaagaatgaatttggactcttacttttcaccaaatacactaacattaaatttattaactacctacacataagacctaaaattatagaactcctagaagaaaatataggggaaagctccatgatattggggctggcagtgatttcttggatgtgacaccaagagcacaggcaacaaaagcacatatagacaaaaaggataatatcaaacttaaaattttctatgtgtcaaaggatgcaatcaacaaagtgaaaaggcaacttatggaatgggacaaaatattgcaaatcatatatctaataagggtttaatatccataatgtatttttaaaaactcctacaactcaacaacaacaacaacaaaagtaaataacccaatttaaaaatgggcaaaggacttgacatttgtccaaagatgatactcagatggccaacaagcatatgaaaagatgctctacatcattaatcattaaggaaatgcaaatgaaaaccacaaggaaatattatctcacaccggccgggtgcagtggctcatgcctgtaattccagcactttgggaggccaggagttccagaccagcctggccaacatggtgaaaccccgtctctactaaaaatacaaaaattagccaggcatggtggcacgcacctgtaatcccagctactcgggaggccgaggcagaagaattgctcaaacccaggaggcagaggttgcagtgagccaagatcatgccactgcactccagcccaggtgacagagtgagactccatctcaaaaaaaaaaaaaaaattatctcacacctattaggatagctacaattaaaaaaaaaagtaacaagtgttggtatggatgtggagaaattggaagccttgtgcattgctgctgagaatgtagaatggtgcagctgctatggaaaacaatatggcagttcttcaaagaaacaaaaatagaatcaccatatgatctaacaattccacttctgggtatatagccaaaagaattgaaagcaggatctcaaagagaaatttgtatacccatgttcataacagtattattctcaatagccaagaggtagaagcaactcaagtgtctatggatggatgaatgaataaagaaaatgtagtatagacatgcagtggaacatactttagctttagcttcaaaaggaaggaaaccctgtcctgtgctgtaacatggatgaactttgaggacattatgctaagtgaaatatgtcagacatattctgtctaagaatctttgtttatactaagacaaatactgtcttaatatgaggtatctaaagcagtcatattcacagcaacagaatgtgaaatgcagaatggttgtcaagggctgaggggagaaggaaatggggaattgttcaacaagttttagttttgcaagatgaaaaagttctggaaatcaattgtacaacaatgtgagtatgcttaacattactgaactgtacacttgaaacagttaagatgataaattttagattatatgggttgttttttcttcttttctttctttttttttttgagatggagttttgctcttttgcccaggctggggtacagtggtgccatcttggctcactgcaacccctgccccccaggttcaagcgattcttctgcctcagcctcctgagtagttaggattataggcacccaccacctaattttggtatttttggtagagacggggtttcgccatgttggccaggctgatcttgagctcaggtgatccacccggctcagccttccaaagtgctaggattacaggcgtgagccaccatgtccggctatatgggtttttaaaccacaactaaatttagaaagaaaaactcaatctagagaagcagatagtaccaacacctttcttgtactttcaatgaaggtcaactcaagttcatttctcttgcccagcaccagaggttgatctgaagccagcctgtctgagagtcagcaacagagtcagccgcactgggactgttcagatcttcagcctacccaagggcagactccccaaattaaaaattaccccccatttcctgcctttgggctactttagtgcctctcagaagtgtcctcagggaaacggctctggaaggaagtaaaactgaaggcagagctggtaaaaagttctgtgcacagaggaatgtgaggctactggctaaaaacgactgggtttcaagtagtcttgcacctgccgccctaaccacacataagagaagtgactattgggacaaccaaagctccttgatgcctgcacttcctcctgctttatttcttcatctccaaagggattcatccaatgacttcttttggcaggaacattctagctcagagaaggtgagctgaaaattaagaatagctgtttgaggagaaagtgagagaagggctcataaacgtctgagatagaatgtacgtgaatgtccatgaaggcaaccacatgcctgtgagtgtaagtcacacaggaaggtgctggccgatggtttgtatgagagcacccccatccttgccatggccacattaagaagctatttgaacaccggcccatatatattgtgattttctcagaggggaagatttaagggacttgaagaaagcagacagcgtttcctactgaaatgctgtcaggcaagctatgcacagaacttccagtcacatatttggtgactattaacatgggaatcaccgaatatgggtatatttttatgccacatagggacataaaattccctgctataatagaaaaatgtaacattctcctttgaaatatctgtactctgtttaaattagcaagtatacatggtcagaattcatgtatttgtgttagttttccaagtgaggatttttttaatgactttctcttccgggtcaagtgtgttaattttaaggatgactttagcactttttattataatggatcttttttaaaagaatgatggaaggttgggcgtggaacctctttcagcctgagctttaagcagccctttgagtgacctgatggatgtcaaatacacacaggtgcagcagccggcacccgccaggtgtgctatcaattccagccactggtatactactagtttttaaggtagttccagagtcatggttaaaaaatgaagtctctgactgtgatgtttcctgcatgatcaaggtcaaattttaaagtcattttccagatctaatagacggcctctctccctggccactctctgagcaaagtagccatagctgagattttccttcacaaattaaatatatgtatatacttagagaagcagttgctgatgttttgaaaaaggagtatttacttagaaaagcaaaacaaattagtaaactgcttgctttacataaataaactctttggaatcatgtggtatttctacgagatgtcagggctattacctgtggtcagataaatttgcatcttacaaagctaaccaggtttctttttcataggacttctcggtgggctagcttaccccagaaatctcccagaggggctggaagctgagtggttcccacttttatctgcccatggaaagctttcagtgctggacatctctcaaactaatgttctgagaaacacactttgggagaagtggggcaaatgcaaatgaaaaatagagaaaaagcttccatgtttaggggtgtgcttcgtaacttacactgttacagctctttttacatacttgacttgttaattctacttccttcttcaggctgcttttgactttggcctgttcgtaccaaaccttgcctatcaaagcgttatataaattgctatagaaaagatttcaactgaattaggaacaccaaggaaatgctttcaattcccagattcatagaatgttagcacccagggtggagaaaagaaggaaatgacggggacgtttatttcatgcttatgtcccagcccagtgatggccagacttgtctcccctgacaatcagtgggtgctggaatgcactgcccctgcaccccgcaggactgaagactcattcccccagcagctgggcaggctgcaggcagacgcccccaggtgaaggaagctgtgttgtccaaagcccacatccagtgactgtgtaacctgagggtataaaagctcagcttctttgctgcaatttgggacaagtctgaaggaccagccacacttcagaattccctggggtcagctggggtttttgttgagactgccttgccatacctccccctgcccaatcttgcatcctgtgcatgccactggccttggaatctgcttcccagaaaacctggccagcaacggttctccaggaaggacgaaatctcaggctaaaactggaagtggaaagtagccactttattttctttttaattcattttaatttccatctcaagcttccattctgcctaatggcaatatcatagtctttgtcaatttagagtaaattcagccagttcagggattccctctccccacttccccctgggcttacgtctcctttccatgggacttcaggagttgtcatctctctgtgccagaatccattgaaacatcccatatcctggtcgcaggctggtttgtagtccatgccccatttgtagctgcatcctttttggctcaaatgccaggtcttacctggcggctacctctcagtgccacgtccttgccactcatagctgcaagggaaggaccattcttctgcctcccactcatggtgggctacttggggacaacatgaggttgcctaatttgccactatagaaattgtttgtttatagggcggaaaacccactatagtagagttccattgtttagcactgaagtattattcaaagtaagtgatttagagttgtccagaaagtcctaaagaagaagttattttttggtgtccctgggtgaaatagaggccgtcagacatgttctacagaaatagtttttaaattagttccatgcaacctcccacattgctttaacatatctttattgagtaccttccatttatgggtttgttcaagatgccggggacatagtagagaaacacatagggaagacccttgatctccccagtttttttttaaataggaatttggtccctattaaaccaggacatcttcagcagtgatttcaatatgaggaccacaaacaagatggcatttgctttcacttcccctgtcggagttaggtgagatcccactttcggtggcctcccccaagggaacatcagcactaccttctgctcagtcaattgtcacaactgttgactctctaaatagtcagcaacttagactttctccatgaattggcagtgcacaggccacatctggctgacagacatgttttgactggttcgtacattgtttttaaaaatatttttaattttggagattttacaaacatttggatttctagtttctcttttttaaaaaaaatctgttaggccaaagttcacagcctcatatggcaaccaatttagccagagtttaagtactgcctcgtccaccgcgctgccttcagatggggcaggtgctttgcagttcagcacagtctggtcagacagccaccctccctcacctcctttaccctctggcccctggaggcctattcctggaggattttgtctttacattaatcaaggctgacaaagctgcatcctggagcttgtgattctggccccacctactatagtatttacctgaccaagctttggcttggtgctttgcacctgcatcaagagatttgacaagcagtggatgttggtgactcacacactgttgattgtgatgtggactgtttcacacccttaacaaccatctctatgacagccattggtgttgattgagagatctcactcgttcgctgtccctctagcaatgataggatgaaagacccagcccccctgcggttgggtgaggccatatggcacttcagaccagtaaagtatgaaaggagatgatgtagatttccagatgagtgcattgtctgcctgtgcaagatgcccagagctgtcttctcctcccactactgcaatcagcagcatccaagatggtgggtgctgccagctgagtcccggagggaggagacacggagcagacccccagctgaggaacagaggacatggagcatgattgagatgtagatcttggtagatacaagaaactcaggttttgggatcttttgaccctgcagcatgacctagcctgtactgagtaatacagtccataaaagagacttctccaagagtcctgagaaaaattcttcttagaagctggtttccacttatcttatggatcctaagaatcttctttagcttctaggaactttagacctaactgtagcagaagtggggtattcgggtaggtgttctgacttttcccctggtttaatcttattttttctacttcttatcatattgtaaggaggctatgatttttttaagggaagatcaatactgtatataaaaataaattattatattgatataatttactttcaaatacatgtatatgtctcccttgaaataaattaatttgtactgatataaaacaattaaaaccctgagaatttgctgtacatatcttacagggtgtgtgcatgaatgtggtatttaactcttgggacttatccagaacttctttttaagagtggactgtgggccgggtgtggtagcttacacctgtaatcccagcactttgggaggccaaggcggatggatcatgaggtcaggagttcaagaccagcctggccaacatggtgaaacctggtctctactaaaaataaaaaaattagctgggcatggtgaggcatgcctgtaatcccagctactctggaggctgaagcaggagaattgtttgagctcgggaggtggaggctgcagtgagccgagatcctgccactgcactccagcctgggtgatagcgagactctgtctcaaaaaaaaaaaaaaaaaaaaaagagtggactgcaagagaggttaatggattgtaggacactgggatttttgcatcagaaatgttgccttcagaaatatcttaccttttatatggttaataataaacaattatggactagtagtttaaagttgccagtggtaaagtggaaatatttataaggaaatgtgtgatttgagtttcttttacgtatttatttttgtttgtataggagaacttgctggcatttagggttatttgccattagttgcttgaagtagtgacaactgcccctagattccttccatgacctttaaccctagcaaagtcattcttgcttaaaaaatgacatgagacatatccagtctctctggagttaccttcactactagttttctattgctgtgtaacaaattaccataaacttaacaggttaaaacagcactcagatgttcactcagttctgtaggtcagaagtccagcagactcagccaggttctccactcagagtatcacaaggcccaattaggcatggaccaggcggactcttatctgagtgctctggggaggaatgcacttccaatctcatgcaagttattggctggattcatttccttgagtttgtagatatgagctccttacttccttgctggctgtccgctggggactggccattgctcccggtggctcccatcttccttctcacatggtccctccgtcatcacgtccatctgccagtgtcaagtctttttcacactcttaatctctctgacttctccttctgcccacagctggagaaaactctctgcttataaaggattcatgattatctggctgggtgcagtggctcatgcctataatcccagcactttgggaagccaaggtgggtggatcacttgaggtcgggagttcgagaccagcctggccaacatggggaagctgtttctctactaaaaatacaaatattagttgggtatggtgcacatgcagtaatcccagttacgtgggaggctgaggcacaagaatctcttcaacctgggaggcagaggttgcagtgaactgagattgtgccactgcactgctagcctgggtgatagagtaagactgtctcaaaataaataaataataaaggattcatgattatccacctagatcacatccctgtctttaggtcgactaattacatctgcagaatcccttttaccgtataacataatcatgtaacatgatgtcacatggcataatcaggggagtaactttaggtgtcaaaggtcatagggggcatctgaaattctgcctaccacatcctctgtccactctgctacctcgcttccatagtctttggtaactgcatttctcctgtttatccgctaccaactcccatccaaactggttgctactcatatatctgttgaccaagcaagctattagttcaagtgtatattttttattctttttttttttttttttttgagatagagtctcactctgttgccaggctggagtgcagtggcgcgatcttgtctcactgaaaccaccgcctcctgggttcaagcaattctcctgcctaagcctcctgagtagctgggactacaggcatgcaccaccatgcccagataatttttgtatttttagtagagacagggtttcaccgtgttggccaggttggtctcgatctcttgacctcatgatccacccgcctcagcctcccaaagtgctgggattataggtttgaacctccgcatccggccattttttattcatgtttatgtgacatgtttggaataggtggtgcaagatggtgatgagaaatatttgggtaaggttataggcagcatggcaaagtaattgggagcacttggaagcacaaactctggagctagctaaactcgtttactagttgtgtgactttggatattcacttaatctctctctgcctcagtttcctcatctctaaaatggggactatgatagcaacaacttggcaggattgttgagaggagtgaatgagttagtagagtgcttaaacagacctggcacagggttaccaccacatgagtaagcattttaattagaataatgccagatgctataacacatacattcccacatcttagtggcttaatgcagtcaaaggtcatttcccacttgcatcatggtccaatggggatgtttctggttgggttgcattgtttgtggtcatttaagaacccagactcctaacatcctatggctctctctctaaatcactggctctcaaagtagatccaagaaccctgggttccctgggaccatttcaaattcagaccatttccacaaggccctccttttccaactgtgtctctgcaaaagcctggattttttttcatattcttcaaccaacacaacaagtgaaatataggaccagatgtgagaatccaactgtcttctatcaagttagataacaaagagatttggaaaaacgtgacataatgctacttttgtcatttttttgtttgagccaatatggttaatttttatgtaaaaactacttatattagcacgtagggcctataaaatttatatttttgtatttttaatgtattaatattctgaagttttctttgtaagtataaactgatgcaacccacagaagcaaaagctttttggggtcctaaataaagaatataaagaggttctgagaccagagttgaagatgcaatgatgtaaatcctgagaggcttttctggtcagctggaaaatgagtctctttgggccgcactggggaggtttctatgggccagtcctggaagtagcacatcatttccactcgcattttcattgagtggggactgtaactggctactgctcaagagaaagcagaaatggatgggtcaccgcctcccaatctttacagtagttgactgttttcaagggtttattgcctcttgccctatgcatatcacaagtatcttgtttagtgttctccaagagcaataacatttggtttcatatactcagaccacttcagaaaattccagaatgagcctagtttttgccctagtcatttggaagttggcagacacttatctgaaatagctatgcatttaaccaagtaagtaaaagaagagatatcagtctttttagaatcaggtggtattgcagtaagagtgaaatagtctataaacatttctgatctcctttgaaactaacagtaagagatggtgggaactaaatttagagactcttttgtttgttttgtttttggttcgctttgatatctgataccaattatataaaatctactttataagttgagaaattgatgacctttgacaagaaacacacaggttgcccatcttacactttttggaacaaagcatgagttacacacacacagacacacacacacacccatacttcaaggttcagttccctggaatatgtgttcaaggttcagttccctggaaaatgtgattgagttttatactaaagctttgagagcaggacttgagtgggtcctagtacagacttagataaaattataaggtagaaatttgatttttatatttgttgtgactagattaattttagatgtttatattacatataaatttggaaatgtatctaacaatatggtgtacttttgtgctttatatggactttattatatataggaaccttgcgtaattagcgtatagctatttaagcttcgtagctatatcttcgatttcatatgctgtttgtgttataattaattggcagtataagacctctgtaaagaatagaagcacgctgttccaaggagaaaaggtaaatccactttaggatgctcccctttaggaggccatttctactgtacttagaaagaaacacgctttgcataggatatattgcttaatattttcttagagtttaaaggtagcaaatctttgttgagtaacagagtccagctaaaagatttaaactgtgcagggcatttgttgtttcctgaacagaaaggccaagatatggtggtttcaggatgcgttggagctgatggttttgtcatggacccaggctcttttcattgcccctctgccagccccactacatggcctacccccttgatttggtcaacaagtgcacaggaagattgctgttccatcacaggtgttaaaagctttagacaaattaaatttaacgcagtttagttgagcaaagaatgattctagaatcaggcagtccctagaaccagaataggttctgagtgacttggggctgccacgtggtcagataacatttatggacagcaaaaagaaagtgttgcacagaaaatgaaagtgaggtgcagaaacagctggattggttacagctgggccgtggccttttttgagtctgctctaaacaactggccacatttggttggctaaagctcagctacgagagtagtttacacatcaaaaagtctgtttacgcatcagagtaggttaccattcactatgtatggagatgagacacctttaggccaaacttaaaatatgtacgaaggcagttttaggccaagcttaacttaacagaggcatcacgtgacaatgtcctaagcagagggtaagaaagatgatagcaaaaaaaaaaaaaaaaaaaaaaggggacttctccacttctccatccctccctttacaggagaaagcctctccccagcggactttccctcactgacccctgctctgtcccatgccctcctgtaagccagtcattgacaaagtgaacaaggagccataattggcttggactgttcttagtcaattcctgggatccttgcatgttgctgcctaagcctagtcagggtcctgctggcgagtaagaaagagagagtaactggggggcagagaatctgcccccaagcctaaccagtaagcgtacctggtatagggaacacccacaactcatagaatatgatcaaagtgcaactgtccaattaaaacgcttacatttagggaagttttgcccctgctcctgggataaatgctctgttatgccccctgacttttctagccacttgtagctaatagaaggccctaccatcactttcaatctcaaaacacaggcttattttgacaatcagaattcctagtcctgaataatactagaaaatccaaactggattatagagttaaatctctcctcccttagccacggctaacttcgggagggtgcctgctgcctggcaagggatgagatcagcttcttccctcatatttcacccttgttccctagctcactgcccatagggtagggatgcaaagagtggggagagttcttccttgactgagaccatcctaagaaggcttcacacttactgggcatggtgggcacgtttgtgggttcttagaaggttggttggtccactagacccctctgactacagttcttgcaacagaagaaatacataagtggcgatataacttcttctaaactgtctgctaaaccggacagtgaaagtgggagtgaatggggcaggggtagtcatgatttcaccaggccaacagtcatgaaccgagaccatctaacacctgtattgggcaatcagggaggagggccacagggccaccttagcaatgcacagattctccagtggccacactcccatcagcccctgcttttccaacaaagaactctcttttcaagtcccttaaccttccagatggtcctgatggcctgattttgagaaatgctcagttaggtggaaatgctattgctttccagacagggccctctcatctcaccctgcgggctgacagccttgggatctcaccctaagatggctcaggtagcttcaacttcggttaagtgccctccatttctgcaggatttaggggtttgggactcacagctgagtggatcaaaagaatctccttatgaatcctttcctagtgttcaaccaccttccctgttttttttcactgccagtgtgagtgtgggatctaagagttgtgaaccggttttccctggttcctttgatacactgccttttgacggtgtgcctcactgtgaaattccgtagctattcctacggtgaaacattcagtcataacatcctgacccagaagcatgaatgatatgtcttgctataatacagtgatgtcccaataggctattggcattcttcaggggtccaagttcccacaagggatagcccaaggctaataccttttctagtctagtattgtttgctattctcttcctgctgtcagctatgaactctacccacttccctctccccataatttgtctccaagtttgctgatcagggcaacccagaaagcaatggagcttttcaaggttggccaattaaaggatcctaactcaggaatctatactatactcgcctactaagccataagtacaatggaagtgtgggtatgtgctggaaggaatcaacatcattagtaaatacatatggaaatgtgatccatttcgctgtacctggcagacctgtatttaatagttttagactgaagaacagaggacaacagatgtaaaatcattttataatgatccctggattattttggactagctatgcgtcacgggtaatcctggtttatctctcgttgttgttttgttcatcgttagggtattttcagcagctgtccctggccttttggaatataattatgtttttctctggagctataatttgtctgctgcaaccagaagaaaaaggtttgtgtggaaccagagctgacaactgggaggctgtagctccggcattcttctgttggcgacagctctgtaactcctagtgtataaaaagacattccagaaaatggttaccaaaaagaattcttgcacggatatagtttttccatcagagggatcagctcttactggcaggagtgctttatttagggctatttctttcattcagtgtttaagtcagcagacacttatcatgaccctataatgccaaatgcacagtgctacatgccgtggggggagatttttttttgttacactttggcaaaaagtgatgtgtacacaaagaaatagaatacaaagtcatagttgctttatgttctattgtgataaggtccggaaacccaaaaaggacctttggggtcaaggaaaatcttgtgagtgaaatgggatttgaaagatgtgtagaactgggaaggactgggctgaagggagttggcaagagccaaggtcacggagtaggaagtaccagtgtattttccttgtcttgaccataagtgattatttatattacagtgactatttaatggatatagattttttagagtgaaatgagacgtacaggaataaaccagaagtgtcgtggacaaacctagatgtagagttgcctgatctagaaagaaccttacagggccgggtgcagtgactcacgcctgtaatcctggcactttgggaggccaaggcgggtggatcacctgaggtcaggagttcgagaccagcctggacaacatggcgaaaccccgtctctactaaaaatacaaaaaagttagttgggtgtggtggcacatgcctgtaatccctgctagtcgggaggctgaggcaggaggattgcttgaacccaggagacggaggttgcaatgagccaagatcatgccactgcactccagcctgggtgacagagaaagactccatctaaacaaaaaaaaaaaggaaggaagggagagggggaggaagggaggaagggaggaagggatgaagggaagaaaggaaggagggagggagagaggcaggaaggaaggaaggaatctatcttacagttctctgttaaccacaactgaaagagataaaccggtagtgtgtcctggatgtgcaccaacctctgaggatcttccctcttggccatcttttcttcctctcctaatttgtactcttttccttggtaaaatgaaaagtgcactaagatagattaggtggtgggggttttgaacctcaccaggaaagcctatgcagtttcactttcttttgtaagtatctgcattctttgccccgcatcaccacactagtcaactagatgctgctaatgtggttctgattataactcgtctgcatcccagagagctaggagtgtctgtaacccaccatgttctctgccatgagaaatgtaaaggccccttgtcagtttcatcaggctgctatagcagataccatgaactgcatgccttagaacaacagaccttttttttttttcttctcaattctggaggtggtaagtcagaagtcaaggtattttctgggccatgctctctctgaaggctctaggggaggatcttctctggcctcttcctagtttccggtggttgccagcagtccttgactacctcattccaatctctgcctccattgtcacatggcattttctgtgtgggtctctgtgtacaaattcctctttccttataaggaatcctgtcattggattagggcctatcttaatccaatatgacctcatcttaactttattacatctgccaagatcctatttccaaataaggccatagtcgcaggtactggggttgaatatatcttttggagaaggtcaccacaggtctaaagacatagttctttccttcagaaacttgtcatgtacagtatttggaaaagatattaacaggccagcacagtgtctcatgcctgtaatcctagcaatttggaaggccagggcaggcagatagcttgaggacaggagtttgagaccagcctgggcaacatggcaaaaccccatctctacaagaaatacaaaaaattagccagacatggtggcatgcacctgtagttccagctactcaggagctgagttaggaggatagcttaagcccggaaagtcaaggcttcagtgagccaagattgcaccactgcactccagcctgggcaacagagcgagaccctgtctcaaaaaagaaacaaaaacaagcaaacaaacaaaaaaaccaaccagatcataatgagagaatgaaaaatagaagccagtaaacatatccatctgttcatcaattattttttaagagccaaatgagagaaaccaaaagtgaatggtttaggagaggagagtgatttccaaagcttgggctctggaccagagaccaacagcttctgcatcacctgggggaactgttagaaatgcaaatacttgggtcccagctcagactttctgagtcagatactgtgggggtcacatgtcacttaatgacagggattcattctgagaagtgtgtcattaggtgattttgtcatcatgcaaacaccatagagtgtacttacacaaagtaagtggtagagcccactacataccttggctgtatggtgtggcctattgctcctaggctacaaacctgtgcagcatggtactgtactgaattctgggggcaactataacacaatggtgagtattgtgtatctaaatatatctagacacagacaaggtacagttaaaattataatattataatcttatggaccaccatggtatatgtggtctgtcattgaccagtcattatgcggtacatgactaaattttaataagccctccaggtaactctgatacaggctgtaggttaagaaccaccagtctaggaattcagaaaaagcacttttcttcaagctggagtggataaaactgccagcagcagccaaataaatcattaagctgagaaaaaaaattatgcacacttctctaaatcctatcagaagcgcctcctttttttttttttttcttttttcatgttttggatcatgagaaggggtgaaagttggattctaggagataatcggcccagaattttaactaaggtgtggaatgaagcagtcttctctcactagattttgcttgccctaaagatgcaacatctgccctgtaaacacaaatgcagcatgcatggcaagccctggagtgacgcctcaagttggagaccatagaatactagagaggcacacccaaacctttgaattccctccagccctggggatctcctgaaagggcatattctgattggggactgggctggggttcaagattctgcatctctcagcagctcccagggatgctgggctgctgatccagagaccacgctttgaccagtaagactagggagcatgtcaaggactccagtacctatccacattttttaaagtaggtaaattggcttttatatacctatgcttatagttgaatattttgtttgaatattgactattatgcttgaatattgattatttgaatattacgcttgaatattgatgggaaaaaagctgccaacttataggtgctcaacaagcatttgttaaggtacagttttgaccttggagtttcatttcagtccccgttgtccccagcttggctatgtgaagggcaccctgaccctggactaaagagagacagccctgccttctgattcttaatggcatttggtctcatgcacttccaaggattgtgcctggtgacaccccccaaaaaagtatttgaattctccaaagacagactatagaccacaccgtttgtcccctaagttattaaccaatcatgtgaatataaaccaacaaatttctgatacttctgattctctcttaattgggatgatatttgaataaataacttccagtgtacattcagtgaaataggttcctaagtattgggcttacaatacacattcacagaattccccgggtcttaaacttttatattccaatcaatcctaacctttttttttaagctacactttaatatcagtttattgcttcttattaaaattaataataataataataataaaatttactctttgatcttactgttacataatatgctcactgaataataagtagaggatacagataagcaacaaagataataaaggtttttgaaatccaccagagatactatttcctgccaatgtctacatctatgtaaatatatatttgttgtatctttaaattttaaatttttcagtattttattgccatattcttacaaaagtcatttaaatattacatcttcattgtacacaaattagacaataaagatttaagaaaacatttgttgagcatctgtacctgacctagtagagatttccaaggccatatgctggtgcatatcttctcagcatttaagatatctaaaaccggctgggcgcggtggctcacgcctgtaatcccagcactttgggaggccgaggcgggcggatcacgaggtcaggagatcgagaccatcctggctaacacggtgaaaccccgtctctactaaaaatacaaaaaattagccgggcgtggtggcgggcgcctgtagtcccagctactcgggaggctgaggcaggagaatggcatgaacctgggaggcggagcttgcagtgagccgagatcgcgccactgcactccagcctgggcgacagagcgagactccgtctcaaaaaaaaaaaaaaaagatatctaaaaccataataggccaaaaaccttaagaatccaaaagcagcttcttcctgctaagaggcttagcataatttctctcctgggtagatagctctttgcttagggaaaaaaaaaatacctatatagattatttcgaaagaaaaagccttcagagcatagtctgaaaaagacaggaataaaataaaaagctattatatcatttatatttaagttaaatatacaaatatatatacatggagcccagaggggtcagagcaagaggctagagcttcattggggtgtcaaggtcagtaagaatggctgaagagctttaagaacccaggtgtctaacatataattttgagtggatttctagatgatactttaacgaagctgtccctcctggtcttacctcacccttatctcttagtgtagtaaaatctgcaacacatgtagatttgagagtggaacatatggggataatggtgatgtctgtcatggatactggtgggcagaaaaaggacagtcaatgaaggggtaagacacagagcagcgtgcaactctagccaaagcaggaagcagttcccaagggggcataccccacaccagcctccaacacccagaagtagctagagaaccattaaaattttttacctattgaaataaacactatgcagattcaagagattcatgcagttctacttaaatctggttaaagtaacactagaatcttattatttggcaactcaaaggctggttttttttctttcttagcaatttgttctgaacatatttctagatcaccaaataacctttaacaaaatcatttttaatggctgcgtagcaattcattggatggatgcactgtaactaatttaactaccttctatggttagatgtttaagttcattcttttttttttccatgttagaaacaactctgcaatgaacatccttgtagctaaatctttgcaaatgttcaactatttccttagattaaatttcagatatctattttacacatttgcactcatattaagatggatagccagtgtaactttacctactttgcactgtttggggaacctctttcctctcctcttatgccatgagatcatgtgatttttgtcctgttttattttgttttcaggaaatatcccttcatattttgtatctccctttggaacattctgttttagatagccattactggttgattaaacaacctttgttgagagtaatattagaaacagacagttgtacattgtagaaacaattgtttagaactattcacaatattattttgaattcctcttcaaacattggagaggcactgatactgttttcctattatcttagtttcactgattcactgactagtctataaccagagatgcctgtttacctcatatctatcagagggctaatgaatgtgacatttgcctcattaacctattattcatcctacaaaacctactgtttcttgagagtctgctgtataccaggcctattaaggaggttttgcctgtattggttttcagaggacaaaaaggagacttccctagttgtacagaactaaacagtcttgtgtcatgatattgtcatcatgaatatttacacatatgtgggtgccattggaatagaaaaccagaagccaaactggacatgtagtgacagggacttaatctttttcagcctggtattctgagtacttaggatggaactttgcctggtatataacaaccattcagtaaaattgttgaactgaatttaactggcttcttcctgttccttgactctgccatgttcattctcaccttagaatggctttgcatgtctggtgttctctgcctggggtcttcttccccacaagatctttccattcttgcgttttcttgtccttcaggtgttggctccagtgtcgcccctctaagaaggtcttcttcagctgaccatcctcactcaggccctcttcatccacatcccccatatgaccctctgctgtctgacatcatcatcctcagtgatatgcttgctggcttatgtcctgcttctgctcagtagatgagtgaggttcctgtgtctcttattcacagctttgagcctatggtccagaatggttcttgggacatagtcagaaatatttcttgattgaataaatgacctaagtataatgtaaaacaaccactgtggatgttgaattaaagccacactaacagtaactcacacttgtctagcactttataaagtatttccatgcacattatctcattaggttctcacaactctgtggagttattatctccattttacagacaggcaaaccgagtcttgtgaaggttaattaactggttcaagttccacctagtaagagaaggagctgggacttgaaccaggcttgaagtctgactgtaaaccacatactggtgacaagaaatcattttgtcagaactatcttttaaagaaagcgagactcctagtacagtatgtttagaaacaaaaatttatgtacacattgaacacaactccaaattctgaaaaacaacaaattctagcaaggttcatccccctcactgattatagcatggtagtttatctgcattaaatatgctcttttgtggctaaaatgtagtatatacctaagacaacctcacaaacatagcatttataggatacaaaatgtttgtgcaattcagtctttagccaatggcaaaagtaaaagtaacagtaatcagtgaaaataatatatatgttagagggcttgaatgcacaatggttatcatcactatacaacaattaaagagtgcacagaggctgggcgtggtagctcacagctgtaatcttagcactttgggaggccgaggcgggtggatcacctgagatcaggggttcgagacaagcctgaccaacatggcgaaaccccatctcaactaaaaatacaaaaattagccaagcgtggtggcacatgcctgtaatcccagctacttgggacgcaggagaatctcttgaacccaggaggcagaggctgctgtgagctgagatcatgccactacactccagcctgggcaacacaatgagactccgtctcaaaaaaaaaaaaaaaaaaaaaaaaaaaagaatgcacagagaggaaaaggagtttgagaaaatgcagtgcaaaggactgctaatctgctttcaaggtgtgtgatatccaaacccgtcatcaaaataagaagaaagcccatacatctgtggccaattgattttttggtagaagtttttatttcatatttctccattttttgacttgaaagatactagaacttattttttgttttttattatttattgacaaattatagttgtatatatttatgaggtacaaagtgatgttatgtttttttaatacaatgtgaaatgattagatcaggctaattaacatatccatcacctaatatttgatattttctataatgagaacatttgagatttactctcttagcatggggaggtgataatcaaagtacacaaagcctcagttaaagagaagaaataaatttcatttttttttgttgagatccatgtccaattgatttttgacaaggatgccaagagcattcaatgggagaaagaatgaataatctctcaattacatagtgctgggacaactggagatcctcatacaaaataatggagttgggctacctcacaccatctacatgaactaactcaaaatggatcaacaacctaatattggagtgaagacttaaaagaaaacatttctttgaagaaaacaaatggcaagtcttcatcaccttggatgtggcaatggattcttaaatatgatgccaaaagcaagagcaagaaagaaacatagaaaattgaatttgatcaaaattaaaacttttgtacatcaaaggatattgtcagaaagtgaacagagaacctacaaaatggagtaagatacttgaaaatcatatatctgataaggctgttatatttcaacaaccaaaagacaatctaatgaaaaaataggcaagaaacttcaatcgatatttttccaaagaaaatacacaaatggccaataagcacatgaaaacatgtccaacattattagtcattagggaaatgcaatcaaaaccgcattgatattacctcacacaccctaggatggctataatttttttttaaaaaaaggaaaataagtattggtgaggatgtggagaaatcagaaccttcatacattgctggtggaagtgtaaattggtgcagcctctgtggaaaacagtctagcagtcccttacaaatttaaaagtagaataccatataactcataaattccatatctaggtgtataacccacataattgaagacaggtactgaaacaacacttgtatacaaatgttcataacagaactacccatggtagccaaaagatagaaacctgccaaatgtccatcaacacatgcttggataaacaaacggtggtatatacgtacagttgaatattatttggctgtaaaaagaatgaaattccgatacgtgctacaacatgcatgaactttgaattgtatactttaaaatggttcatttgatgttatgggaatttcatctcaaatttaaaaatctggaaagaaaggaaagaagtggctcagaagccacaggaagggtattagttgtaactccccatcaggtcagattctcatgactcaaatgggtgcatctcaggttacagtggcctaaaagctatagtggtgtatgtgggagggagggtagacacgtgccaaccaaataggattaggctgctctgtgcagggttgattgagctcagcctgatctgcatggacaccagggcttttatttcgaaggtggattggctctatttgttgttgctatctctgcttagtgttatttgaagggctctttcagttccagactgtataaataacaacagaatcgtctgttgataactgaaccatcccactctgagagttcagggtatttacctctaattcccaatacccacagccaggtttcagtgtgcacacagcctgacctggtggatttctgccattaaactatttcattttcccacatgcaagagtgtcatatgcatatattgtgtctgtgttctcatgtcaatttatactgggcatgtatccacaaccattctcctaactaccgctaaagtaaacaatattgtcactgatactgcatacatacgaggtcgttttaaaacagccatttattttttcagcgattaatacctgaatgctgcctaggtttttccttatttattccatttctatgattttctccacttaatccccatcgctttcaatttcattgaatttctttttttttttttttttgagacggagtctcgctctgtcgcccaggccagactgcagactgcagtggcgcaatctcggctcactgcaaactccgcttcccgggttcacgccattctcctgcctcagcctcccgagtagctgggactacaggcgcccgccaccgcgcccggctaattttttgtatttttagtagagacggggtttcaccttgttagccaggatggtctcgatctcctgacctcatgatccacccgcctcggcctcccaaagtgctgggattacaggcgtgagccactgtgcccggcccaatttcattgaatttctaactgaaatagaactgaatcagagcagaggtcgtcttgcccatttggatgtataagctgagaagtactgaagttggtcaacagcagatcacatatatgacagcatagcctaggtacatagtaggctctgccatctaggtttgtgtaagtacactaggtttgtgtcagtacatctgatgatgttcgcacaatgacagaatcacctaatgatgcatttctcagaacgtatctctgtcattaagcaatacatgactatgtgtgtgtgtgtatatatacacacaggcacacatctgtcatcataggttctactcttctgtgtttacaaacaacctcaatgtctcagtgccttacatggcaataaagatttatttctcacatgcttttcatgggttggctgcatctcttttttgtgttatcatcattccaggacctaggccaaaggagcagcccttatctgagacgtgctggcctcaggaaagaggagggggtgagagagagatggcaggggggtgagagagatggcagaggtgtgagacaaaggctctccctgctcccactcagtattgactaatgttccctccactcacattttattacccaaagcaggtcatatggtcaagcctaataagaactagacaagaacttgttagaacaagaattcaggaaaaggcaggaaatacttgaggaagtgtctaccattatattatggttcccacataaggcttctctaagttttgctttatctaagatactcacccatggttttgcttatagagcaactttccaagcttccagtagtttagaattgtgaaagaaattaccattataaattttatttatgctgatggaaaaagtaatatagtctttgaaacttgagtccctgtaacaaacaaataaatggattaacagtgtaaatattggaagtctatatatgcataccttttttatatttcagaataaaaaattctatttaaccctttgtaactaacaccggaaaatcctatttcccactcatttcagttatctatggctgcataacaaattaccccaaaatgtagtgactttaaacaccaagaagcatttgccgatgattctgcacgttggccagggctttcagagatggctcatctctgttccacatggttttgtctggggcatttcatctgggcccaaggaatatcaatgacctcactcacctacttggcacctgagctattgtagctgaaatggctggaggctggctgggcctgcctcccttcagagtctgtcatcctcagtgcctcattctctctctccacgtgacttctgtttccagcagcagttcaacttctctacaaaatgactcaaggcctctgcaggcctaagctctgaagttttataacatcttttctgccatatctttttggctaatgccaatcacaggactggtccagattcaaagacaaagaaactagattccacctctcaatgggaggagtggcttgcatatccagagatgagaggaatttttagtagccatctatgcagacaacttaccacactactcttggacagtttgcccaccctcaaccttgaaccaaataggatatatggtaccagatctgcctcatacattttgggggttgttagtttctagcaggcattcgatggtttggatacctttgaagacactttaggaggattacaagaaaggggaagaatcttgaatagaagaaaagagaggtttattctggatctgaagcctagagatctgagcagaatgaagagatagagacagaggctacgcaaaattctctcccattttagtctgttggtcccagctggtatgtttggttagtcattctcctccacgctttcttctggaacagaaagttagtgtcaattctggagaaatcccaccagtacatgtaagtagactagtgtggagcccagacccacagaataagtaagagtcccagctagattcttattgggaacactgagaaccctacctcctagccagacttaagggaacaaataccccaaacaggcctatctcatcccaaactcatgtctcctgttaatggagggagtctctgaactcagttaatacattttcattgccagactctgggaaatcatgaaatgaattcatctggccaccaaaaatgtgttggtacatgtagattttttattaccatgatttgcataaattatgcaaaatccagctctgtattatgtccttaaagcataatagtactcttaatcagctgtagccaattaagcagtaaatgattagcataataaatcctgcactgttgtgagagccgtcagtaaaactggtctgcaaaaggaccgttttttcttttttaagtttagatgtttaacccattattgtttttgttgccatttgtaatcactgctataatcaactcaggtttgctttttgttgggggttcttgtttttttttcttgttaaatatttactgttaccaaacagtaaatatttattgagtcccaaggagctagagtaaatttgatgaaattctatagcattttctaacaaattaaataaatcgatcatcaaatgggtgagatcagattcagtttagtcatcatggtagtaccaaaggcaaagaaatttaggtctccaattacggaattccaagcttgcaagggcccccgagattcttgccttactgtggagccggaagtggctactcgtgcagctctcttgaaaggcgaacatctagctcaatggttctcagccttggaggcacatgagcatcatctgggagcttctaaaaaccctgatgccaaggctataccccagaccaattacatcagaaactctgggtagggaacagaaacaatagtagtttttacagctgtccaggtgatttcagtgtacacccaagtgttgataaaagactacacattagtgtacactgctcgggttacaggtgcaccaaaatctcagaagtcaccactaaagtatttatccatgtaactaaacaccacctgttctccagaaaactattgaaatttaaaaaacaaacaaaagaacagcaaaaaagaatcacctttttagactaactcctgccaagatagagcagtagggacctaagattgccctgccttaggtccctactatatgccttagatccctatgtgtatctatatctcaaaagtgtttcagaaactggacatcagacaacaaaacagtgatccctgagagtctgaaacaaatgaggttagctctgcgattgccccagctgactgccctgagagaatgtccaggcagatgcagggagggagaactcaggcagggcccaggggactttctgagttgctgtgggtccagcagctagagttcacacgacccggtaaggaagatgagagagctgcccaaagagagaaatggagatctgggttactgttaggggtctccctggagtattcagcagatatcagtgcagcaaattcagccgtattagtgcatgcatgtaacaaaactagcgaggctaggaaaagaaccacacaaaggattagaggaaacagtgttgacattcatactgggtcagaaatagtggttttctccaccagctggagtggaaagtcttatcattcatggggccttgggagagtactcaggatgcctccatctcaggagtgggccacacttagccctatctgagcccagctccagatccgcccggcagatcacaaaagcaagacacaaaagggtcaaactgtttccaagtaactttaactgcatccaaaagcgaagttgaagaacatttatgggaatacaaacatacccagcgcctggcaaggtaaaattcagaatgtcagtcaactaatgaaaaattacagatgggggaagaggcagaaaaacatcatctatgaggggactagtcaatccagaactaacagagatgctacaatgagcagacaagggtgcttaaatgggcgttataactgtattgcttatggtcaaaaagttatgttgagacatggaccatataaaaaaagatccaaatcaaacctttagaaatgaaaattctaacgcctaagatgtaaagtacactgcatgtgactcacagcagactagaaattgcagaagaaaagattagagagattaaagacagaaatagaaactatccaggaatttttttaaaaacaaaaacatcatcagtgagctgtgggacaacttcagacagtctgatatatgtctaactggagtccccacacagatgagagagaaagggaggacacaaaaatatatgaagaaataatggcctcaaattttctaaatttgatgaaagctgtaaacccagagatccaagaatcttagcaagtcccaggcactaaaatctatacccagcacatcataatcaggtacctcaaaaccagtggtaggagggaggggtttcaaaggagcacaaggacagtttttggtgagagggatatgttaattttcttgaatgtggtggtagttttccaggtatatagataacatgatatgtgatatgagtgacaagtgaaaacatttcaagttgtgcacttaaaatatgtgctgtttattgtatgtcagtcataaccccaataaaactgatctattaacaaacagtaacaaccctgggtgcatattagaatcactgggagaactttgcaaaaaaatagaaatttccgtcttcaaaggttctggtttagatagtctgggatgaggcccaagcatccgtatttttaagagcttggcaattctatttggcaagtttgtttgaaaatcactggaaaaaggaaactgcagaaaccttccccatttacatgagctggtggttaatgacctttattctgactaagcagttttatatttcagggatatggccctttgaggtacagtgttaatttccaagttctgagttttctgtatctagtctttccacttataggtacgcaataccttattttattaaagaatgggattttgatacctctttccttatttttgaaactttctgggttttttttttcttttagaacattaatagcttcttgatattcccagaacttcacaacatcatgctcaaagtgggtccattgatttcttagtcgttggaaatgatcttgacctagtcatctgaagacttctaaactccacttgaagaaacacacagcagctttctcctaattctttctttagtttttacttttagtttatacatcccagcatgtcacttccctgcttaaagtcattcttcaccagctaccccaccccaagcttttagatgtgacccagtctcctaatacatcctgtaagatcccgcctcatagatcactacccacttcccttactttcttctttctagccataatgaattttcatttctgtaatagatcaccctgtaactcacctccaagtctttgcaaattctattccctttgcctgaaatattctcctgggctttttctcactgtttggctatctccttctcatccttaaggtctcagaggagtcatcacttgttttggggagttggggaaggctttgtgccccagagcacactatatctcccccaccttagcagttattgctctgtattataattgtttgttagcttctgttatccccaaccagactgtaaactccttgagaacagaaaccagtcctggcatccagtacagggcatggtccatactaaatgtgtgcggaatttaattcactgtaaaaaatggtgctacctcgcccttcatcaaacccagcatttctgatttacaagttaccaagtcagctcatggacattactgctcaaattcagccataggagcttcatactgcaagagagacttgataactttgcagcattaagttatttgccggcaagttaaacttagcagaataaacccagagtgaagtgtttccttattatttcacacaagggaaaaagcagaacaacttaggaattgcaggaaaaatgggaggctctaaataattaaggtgtgttggaattaaggtgagtgtctgaaaaaaaataatctatgtgtcaggaaacctggtttgaagcggtaataatggaaagcaaatctgaagttgtccttaaatcaatagaaatcattcagattcttatggtgggagactaataagtcagaatccgtcctgcaggcccagaacagaggtaaataggcatcattttgtaaataaagtattattggaatacagccacatccattcattgaaatataaaatatgggaaagttcgtactacaatgacagagttgagtggtccagacaggacagagactatatgggctacaaatcgtaaagtatttactgttggtactttacagttgctgatccttgagctaggaaatgaataagattatttgcattcattcagaatcatttatggagttctgtagtatgttgagcacagtgcctggcttatagttaactcaaataaatgtgggctgtgattgacattatagtggttgggcattgatgaacagacactgggctcaggtaaaggccctgctacagaaggcaggggtacagatgttcaaggcatgtgaagtaatttaggccaaggccaagcccaaagagcaaagacaaactgagctgggtggtaacttggtgtttactctgttctaaagcaaaccactcttggagaatgtttttatcactttcttttctctatttccagagaaaacgatcacaggccaagcttaatttgtggttagtcagtatttcactctgagttccgtgaagtggcttccaggatcttccctaggggatgtggtacaggtttaagaaattcagggtgtgtatttcacatcaattgaagaatctcttgaaggcaaacagaaaggttagtttcttctgtttgcagtgcacacttttgtttgcatgtgagcatgaatcatcagtctcctcactaagcataatccaagcagacgaagctcaaattaacactaaaggaaggtagcaagaatgagtttgtttttaaggattttgtggtaggcagaataatggcctccaaagatatcagatcctaatccctagagccaataactgtgaccttaccttggcaaaaaggtttatgcagatgtgattacattaagaatcttgagatgaagaagaatcttggataatctttgtggaccctaaataccagcacccgtctctttttaagggagaggcagaaggagatttcacagacagtcacagaggagaagtccgggggaagtggagcagagaaggatttgaagatcctggggtggtgcagccacaaggccaggcatgcaggaagcccacagaagctggaggaggcctggaacagattctctcctagctccagagggagcacagccctcgattgcagccccaaaaattcttttcacacctctggcctccagaactgtatgagaataagtttgccttgttttaagccaccaaacttgtagtaatttgttatagcagccacagaaaactaatacagatgtattcatcagatgaatggtaggtacattacttcattacttcttttttttttttgagatggagtcttgccctgttggcaggctggtgtgcggtggtgtaatcttggctcactgcaacctccgcctcccaggttcaagcaattctctgcctcagcctcccgagtagctgggattacaggcccccaccatcacgcccggctaatttttttatttttagtagagatagggtttcaccatcttggccaggctgatcttgaactcctgacctcgtgatctacccacctcggcctcccaaagtgctgggattataggcgtgagccatcacacccggcctcattacttcttataccataataaataagaaagagagagaaacaacaacgcacccccaccaccaccacattaacttctgctttagccacacaagtaagaacagatggtaaataatacaagttactggactggggttggaagagatttttgtctattatgatgctgagaacagtgcccagaacatgtaacatgctcagaaaagagcaactcaatacataaatgatatcaaggcaggtaaagttccgtgtgaattgtcagcttgtaatggcattaggaccctggatggatactgtgattaagcgtggtgcacagacagctgcctgtttgagagccatttgttaccagtccatggcgaaatgggtacagaagtacagaggtcttcagaaactacttcttactgctttcttttaatccactgattgaaaaaaatgacatagttgataaagagctgttgtaaattcaacaatgtttttaaaataaatttgtaattaattacaaatttattaattaatcacaatatattacgttttaaaatggtcatatacgcgaagaagagagaaataattttaggaagctgtatttattccaaatgtagagaattctccaaccacatataataatcatgagcccctgagagtccatgacctggaggttcaaagctacaagccaatcccaccaaggaaactagggtgtgaaggcactctgtgattagccccccgtcttacaatttagttagcatccgagacaggcccaaacccagagcttgtgtcttctgaatcccattccagtgcttttttagtagccactgatgtgacatctcatggacctcctagaggtggtctcctaggcaacctggtgcatgcccataggcctaaatcaggctaaagaaggaaggtcatcatgaccgccacaccacccgtggaggacagcagggtccttagggtcctgggcaggttgcacgtgtgtgtggccttgcactgagacaggccacacttgatttaatgccctgctgttgccttcttgaagttcttaataattttcaaaagagaacatgcagttttattttgcatagacccctacaaattatatagttgggactgtgcaagcaaggccgtttggatccaacttcattttatttctagtttgcttctgctgtcattctggagacacagccttcattattgcacctcaggatctgacagaccatcatctcctgggtgaggacacaatatcgccaggctgggcctcgggtgaaggaagggaagggtctagagcgcaaaagttaaggaggcccttactcttgggggtgtgtgaaggcagagccggcacctgagagggagtaccccttaaaaattgcagctcactttcctcacccaagtctcatcctgtagtacacctgcagtatgcctgtaatgttcctgcagacacctgcagtacagtattctcctgcttcctttgcctctgcgtgcctctgtggtcactgaattttcatcagccagatcaggtggcacacagaaacctaccccattgacttgttcttagatttttctaaaagtgttctttatttgctcagtctctgttaaggaagaattacatttccccattctctgcaagactcgccatggttggctggtgcatgctctactgtgtaagtgtaatttgatataaagctgaattgtcaatagcatgaaacattttataggaagagtgaaagagtagatggtggtctcattcattctgtcccggagagcaagagcagtgtggcatggtagcaagtgaggagaaatcagagaagctcagttctcatcccgactccactgcttcttccctgtgggacctcatgcagtgcttgtgcttcctcagcctgactttccttacctataaaaataaaactgtctctttcacatgacttttgagggtctaacaaatttatatttcttaatgtgctttgcagactataaaatgctagctggttgttgacactgattcttcagctttttggggggaattgttttgcatgatgagttcattctaagttgccacctgctatctgccaatggataaattccacagcatctcacaatatgagttagaccttggaacaggctttactgaggaaaagaaactgacgtcagggtcagccagataagatagaagggcctgctgaggccgctgcactctgctggttggatttgtggtccagggaggaacataccctccccagtcccactcccacccccataatctccttttttgtagggcaagtgggagagcacttttgttagtggggagataatgaaactactttggcaccaggcagcctggatttgagtgtcagctgtttacagaaattgtctgggaaggcaagtgcacagcacctggggaccttgggactaaagttgttaccctggaggaggacaccacttgtcccatgggaagaggagcctctccagctctgagagagagttaggacgcccccccacgccatagcatttcaacctgataattcagggtgaacatctgggctcattttcagacaatcctgcttgtaccaaagaagcatcattaaattctggaagcagggaccactcatactacccccaacattgaaacctaactaggtcattccagggtttattagtgggtggtttggatttgatagagagatcaaggcctacccaggctaaatctaaatccatccactaatgagctataataagaggattccattttaaaagattcactcgggtcctttggactaaaacgctgtcacagttgattcctctagtcagctttgtacctgcttttctgtgattgatgtggaaaccttgtgcatcctaaaatgctgcccttactcatcctttcatcctgacttgtagtctcccaccttccgtcacggcccgaaatctccacctcatataaatggcccagtgggtgccaactctagtggtggggacagggtaggtggactccacagcagtagacaaatcataattgcataatgtaaattttgcacaaaatgctctgagagcttaatggtgccacaaccaattttattaggacacttcaaaacaaagatgacatttgaactggatcataaaggataagtagaatattttagggcaaagaaaggggagaagggcatgctaggtacaggggagcagagatgtgggacttcagctgagataatatgtgtgaagtgtttagagcagtgtgtggcacatactaggtgctcaataaatgttagtagtgctagtcattattgctgttacatatcagggaatttcaaatacccagtatggctacaataccaggagggaaggtctggaaataaaactggagatggagtttgagattttttgtatgtgaagggccctgaatagtatgttaaaagagttaggttttgtatttgcatctcattttagccaactaatccacaatcatgagtgtcccagtgaggatgggccaggttaggctgcagtaacaacccccagatgtcagtggcaaagcatcaaacatttatttcttacccatgtgacatgcccagtgcagaatgactgtgatctttgcccagtgccctcctctttctgtgaccctgctgcttctgcccaaaaatgacacctatcactatttccatttcattggccaaaaaaagccacgtggccatcctaacttcagatggaacaaggaagtgcagtcctaccatggctacgtgactacgtgcatttgtcaaaactcacagaaacgcatgcttaaaatgagtgaattttactgtatctaaagtatgtgtcaacagttctgactttttaaaaaacaccttagtgcattttttaactagactgcttttaaaaattattaaaattatattgtaaacaaccccttaaaatatgatttgatttctaaaaatcaattttatggatccttttagaggcatcataacctgtggcatgctgctagtgctgctgacattcaacagccaggaatgtcttcccttcagggcaggggtaggcaggtgagcaatcctgttctcccaccatggctgattccaggctacggatgtaatgttactgagttagctgagaagaaatgcacacattttgagccaattccagcacaccactaaaaatgtactatgggttgacaatataataagcagcaaggtaatgactgtcctcatggtgttccaagattgcctcgtacaattccctagtttgctggtgatgcgggattagtaatcataataagagtgtcaatcagatgctacagctttgaaaaataatccaatagaatggtacatttaaagctagatgaggcctgagagatcagctagtcgcggcacagttgaggacaccctgaaaggtaacagatgtgcccagagtcacccagctgccacccaggtggcagaactggaaccagaaccccggtttcctgacttcctatttagtgtctttgtgtggctttccccaccactgcaggaactgtgggattccagtttttgaatgggtaccattgttcctagcccattttcagatatccatcttacaagtattatttttaaaaggtcaaaacattcagctaagccatgcctgtggtgaacaagtggcaggcaccagaggttggggaggggtgtcatgggctatttgatagctattggattcaaacaatgcatttctccctggagagaacagaggataacctgacaccttgtctgaggaccgtggtttacccccagcccgcgtgggaacctgttttcatgggctcctctggccgtgtggtggcccagcctttcgcagccccactcctcagctcaccctgcattaagaacaacaacagcagccatgtgctcagagcaagaccactaagcattttccaatctcaactaaactttggagtagccaagaagagtccttgggggaatgagttcattctgcaggtctgagggtggagtcaaaaccaataataataataactctatcataatattgactgtttgggggccaagccagacttgtccctaaatatgtctcagacttctttctcagtctgacaaatgcttgcccttccttcaaggctcatctcaatgccacttctttgaagatgtttctgaccttgaccttggagtacctcccatctgctcctctgaacgtattgcttctttcaccctgcccctggaacactttgaacctgcctttactacagcctgtttcacagagggttttgtgattatttgttcagatgtctatctcctcaactagaccaaatgtttgcttcttgaagtgaggtttgctctgtgtgttagacgtcattagctgccttcatgtggcctggcccagcccatggtgaagaaagagagagggggacagaagaagaaccattctggatcgagagcaaattctctgggaaagtgaagttcccctgtgcccattcatgctccataaatgactgtatgagctccagggtttaagtctcaagctcacaatgcatgaatgtccccaaggcatactcgttcaaaatgcagattcctgcccctgccaccacccgccccctcccccccaccaccaccaccaacacccctcttctcgccattctgatgtctagatctgaggtggggcccagaagtctgtgttttcaccggcactccaggtgatattctgattcaggtgatctgaggacacttttgagaagcactggtctccgactaggagggttctaggaatgcaggcatttagggcacagggagcgtgcagactcaggccctggtggctgcctcctgggctggggagggcacgctgcagcctgcactttgtctccagaaagcaccaggagctggaagatcctggggatattgcccttcatcttccccatctgcagcccagaatccttctcaactcattcaggccacagtcacacagaggcacactggtatgcctctttttccagaatattctggacaaatattcagcttattaaggatgcacctcctgaatatttttaatgctagtcattctgagctgtggaatagacatgcagggagctagcacgggcgatggcctgcagctcgggaacgtgaggcccccaacaaagtgaccacaaccagtgccaccatcagagcaggtcctggatgacctcaggcttccttcaggctgtacctcctctgctggcctcagcagtgacagcaccatgtcctttagtcaagccacacacatccttgaagctgccacattctctgcacagagagtcacgtctgtgctcccgctgagtgataatagggtcgtgacctccttggaaagggagaccatgttccttgcattgtcatcagcccccaggccgtctcagagctccccgtgcctctgcaagccccatttgatgaatctgagaacgagattctggaaacggtctgagtgctgagcagtacctgtcacactcactcacataacaaagtatgtttgtttcccagaagacagtcattgtatattcctactcattaagttactataattatacccacatggggtataattgattttaatttcactctgaggttgctccaggtttcaacagcaagtctctggccttggagaactctctccctttatttagcatttaaatgagtatcaggagggaaacgcaagaagtaattatgaggagaaaccgagtgttgaaaggggcagctttgaagtgcttaaacgtcctgacatggcagtgcgcgcttccatttcagtgcgtgggaagtcagctggatcactggggaacaagatgccctgacgttgatgaattgtgcagctgtactggggaccaaatctctcactcagtgctggagtgattttactgccatgcttacccatgactcagtggcctctgtttatgaattagcacatatttttaagttcttacatgttactgtctctgaaatttacaaataaatcatagtaatactacagtttcaattccccactctttttaaaaacagctttcatgcattatagtcataaatccttgttaactttttaactccatgcccctgttattgtatgtcacaaaagacagtgttatagtttttcattcctgcttaatttaaaactttcccaatggaatgcagatacagtgagctgttttcataggtgtggttagggagatatgttgtataattgaagcctaggtccctattttcagatgggacagattctaaaactagtgggatatgctgactccatttgaatctctgaactatgagacaagttatacaactagatcattggtttcctaagggaatgagacagtagctgtttgtataaggagcatagctgtgcacacacacacacacacacacacacacacacacacacacaccccatgcattacaaatagatgtagaattctaatgttagctgccctacctctgttctccaatattatataattatctgtttatgtgtctcacccctgcccccaactttttacttctcaagggcaaatgtattcccggtgcctggagttaatgtgtgtggaacatttgaagatggaaagtggtcctagctaagtcctcactttagaagtgaggaaagtgagggcccaaatatatcagattacttggccaaggttgcagcagtcaagacaccaagtgtgtatgtaataagcatatgactgttcgatcaaactaaagtattatccaaacgtcctctatcaagcgtcttagtttcccacattctcttggctatgtaaaagcgtgctttagtagagcagacccaccaaagaagataccacatttggctttggcctttccctttacctatctcatctgcaaagtcctttctgtaatgatcccatggtgtgatggaatatcagaattcaggagcggacagatgcaatgcccagaagatgaaattcaaccagttaagaactctgttgccttgaatttgacagtgatcctttcacaaagaagtttccctggttttgaattaagttacactaaactagcagggaccagttcctggttcccttttatgtagtttcagattttctcgggaatcctttggtattctgtgctatgcagtacacctcgccaggaacgcggtgggtcaggggtcagattctcccgctcggaaggctatgaaaggctcaagttcacacggtttaactttttaaagttctcatgtgtctttccaaagacttgtaggattttggaaaaactgtcatgtttcttccctcctgtgttttcatccttacttctttctcctttgccactaattctctttctctcactattcctccctgtcctttgttttccccatgtcatttggaattttccttttactgttgaaaggtggatgcagccctggaggaatcagggtaaggtcatgccggctgggccttctccctagttcggatgagactttccgagctcgcctcccctgcaggttgttcatgagataaaacctccgtgggtcaggtggagagcccacagttgcctcaagatgcaatacaacatctgtttcattgtccagggtggggaaggaacagataattctcttttgaggtcaagcagcaattccaggagctgacccagcctcacagagcagcccatagcagcaggtgggggcctctgttacgacagccaccttcaccgcaggccaggtgtgacatcagcctgcaccctagcagggctccttgtctccccctctcctccctgcatggcaggctcaggtatctaagaaagcaagaacatgactccagcaaacccacaagtggtagaagaagcccgaaaagcttgtctatcgttaccattagaaaccaggcaaccacaagaagaggcagagaagaggaaagaggagcaggacggggaggaggcatcgagacaatagaatacaataggcgttctctgcctccccctctgccactcaggcaagtcaggcgtggctgcccctttccaaggtggcagccacaaactcagttctgatccttatgttcttctaaagcaaattccccttagcatatgtacattgaatcaccagattaaaatattgctacctggctttcacccccagagattctgatttaattgatctggggtaccaagtagacttctggatttttaaagccccctgagcaattctaatgtggaataaaattagggaaccactgcattattggccagataattcctaggtcccatgccccacccgccctcaaatagagcttgccacaggctccactttaagagggcaagggcaaacccatcacccttttgtaacagtagaaatttgggggcaaattcagacccatccaacatttattgagcacctactacttgccatgccctggattcgtgcctccctatgtattatctggcttagccagcagggagcttctaagagggtacccttctaaaggcaaagcgctgtcttgaggtgtaaatacaaactgtctggtctttatgttctgtggctttctaattcatagatgttcctcggacaaaggatgtttcacaggtgccaagagaggatggttttaaaaggccagaggtcatgaggcaagtgttggaagaggcaaagatctgaggggctctgatttggcttcaggacctttcattagagcatcagtaattcttagagtccagaatctttccaggtgtggcttctttggacagagccatctcttggtatcggagggaagcaaatggctgctagtggagggaacagagccctgtccttggctgcataggcacagggaagcagaacagcggatcgggcttctggaagccttgttctgaggcaactcctttgctaccaatttgtttggggactttagacaaaccacccgcttctctgggcctcagtttcctcatctgtaagatgagagggttgcttagatagatgcttaaaagaaatagtaattggtcttgtctcacgatgttgttccacatcacaataatgattttctctactttgtgctgtgtagcataaatggttatcatcaattctattctcatgtagggtaactgaagccattctcctccatctgtattcctggccaaagtaataaatggcagggaaaccacatgttttgagcaaccaatcaagtatgtatttctcaaggacatgcccttagtttactcatttctctattcatttagaaacatgtaatgtatgctacacagccaggcagtgtgctaaagacaggaatacagtgattagcaagacagtcaccaccatgtagaacttagggtgaatagagccaaaagaaagagtgggagacccaggggaggatggaggggtgactaggagttaaccagatgaacaaagaaggatgatatcagatgagatggactgtattctaggaaggtccaagttgttagagtaatggtcccaacttactgggattttatacacatacaaactcaaaatttaagctatatactgagcagaagacttgtttattttcaggcaataaatgtttatattctcgggatctggagaatagccaaagactaaaaaataggcctagaggaaggggccttcatgtttcatgtgtgaagcacagtaatgatgaacagcaaagctttagagatgtcagacttcctaggctgccaacacttcttctagtctatgaactaccttaaatgagaacagaggttaggtattatttcactctggatgcccagagcctaatacagaacctgacacataggaattgtccacttaatgttgcttgattgtctgactggtttgttggttaactggttggttcattggatggatggatggatggatggatggatggatggatggatggatggatggatggaaggaagagagaggatgcaaagtgcctacagcagtgtctcatacatacatataataaattgtaactgtatatttctgtcataaaaaataccttttttgtcatatacactgaaacatttgtgtctataaattcccattcatttaacctattttaatattgtacttggaacagtgtttttctcataatagaaaaaatatagtcattgtttcacacgcattttgtttgtgcaggaagccaaaatacaaatgcattctgcgtaaaacttagtgtcatatataacactgctgagcattaattcttttttaaaaacttgatgagtttgcataaacctgaacaaacatatgtgcttggtcctcaaggacattagctttttcacttcaggagtggaaagggctgctatagaccatatcaccaaaacctgctttggacactattgctgaatgacaagccgcctcaaagcttagtagtataaaatatccattgtcttacggttgcatgttctgttgggtcagaaattagaacagagtacagcagggatggcttgcttctgcttcatcctgtctgaggcttcatctgagaagactcaaagtcttgaggggaactcaacatctgggggctggaatcattgggcatctccttcattcacacatttggcacctgagctgggaagactctcacacactgatgttagctagattgtcaatcagagtgcctgcatgaggcctctccatgcagcttatgcttcccccaaacatggcagccttgggatagttgaactttttgcataacagctcatggctccaatgcaaagatgccagtggacaaggaagaagcttcattgccttttatgacccagcctcaggcatcacatagcatttcctccatcatattctttttttttaaattattatactttaagttttagggtatatgtgcacaacgtgcaggtttgttacatatgtatacatgtgccatgttggtgtgctgcacccaataactcgtcatttagcattaggtatatctcctaatgccatccctcccccctccccccaccccacattagttgaagtaagttacaagtttatccgggttcccaaggaagagacctacctccccactccaccttgaacagaggaatgtaaaagagttttacagccatttagaaaaccccgcatccccagtttttagaaactgagccctagaattccaacacaaggaaatctcaccttatttcattgccctttgagcatcattttcattaatacctagcatttctttttgtgagggaagaaccaggtccccagcctcccaatacacctagaatgtgctggcaacattgtggcaagaagatgcttccttctttttctgaatttaatgcttctcttggattatgccaattttgagaggaacccttggctaccagctaaaccagcggcagtgaactttcctaatggagcaacagagcccatgtaaggaaaccagggcaaagcagttgaccacagagtaaccacctgcaaccacacaagtatgcccaaagcagtgatagccaccatgcttccacccaccccacagacactctttctccttagggtctcggcttttgtgcttttaccagagcgcaacagttttctggaagtgctcagggctatgggtaaaagggcagtttcctgtggactcagattgtttaagatgtcatttgggggtaaaggactgtttaaagagatggtttcttatccatcagatggctttagaaaataaggtgggtggatattaacactttgggtgagggcctggaaatcttgggactttagactctctggcaccagggagttaaacaggtcacaatgtggaatgctgggattcagatgacaccctgggctctgactagcaagacatcatagcagctctgaggggcccacaagaactagagatgtgtccaagctctgctggtgtatagatgtggaactgagtgcccagcagtggtgcctcctgccctgcctgcctgcctggcaccgacatggctgaattgtaccttatgccatcgggtgtggccagtaatcctgtgcttactttgactggcattgccccctccactggccctgaatgactcacctcatagaagaaaaaggatacataacaaccttttccactccccacagtgtcacccaggacttgttgacaggaccaacaccagtcttcttatgtgtgcattgttcagggtacagcaggatggctagctaagcttatttaaagcatagttacgattaatcataatcatagctgacctttattgagcccttattttgttttgggcactagaaactatgtgtattgcctgtttcaatcaacacaacaatcctgaggtatcaagtattagtttcccggacattagtactggtaggtattcattggccttgcaaatagtttggaaaatgctggttgttctaaaacagtgacatgcctgtaatcctccaagaaagtgatatatgttgactttttgaattgtatttaatcaccgagcaactaatattttaaggaacatgaatttgaaacctgactggatgatatagaagtgggtctgcgtaaaggttgataggtgcagcaaaccaccatggcacacgtttacctatgtcacaaacctgcacattctgcacacgtatcctggagcttattttaaaaaagtggattttcataaaatatgcttagtgtcctatgagtagtctaagaaccattggaactaggtgtagtctaaagcatcagggttggatttggtgtgactgcctttgaaaatggctactcatgatacacccaggttggccaggtgactcctgaatgtagctgatggtttgtgcttagaaatgtgtcctctgcttcataactctcaaagaagcctgctgcatcacaggaacagggagctccatctgcttccagcacccagttacatgtgcaaggtgaggaagctgaatgtgaaggttttgagcccatggagacgttcacaggctgccctgctgttgtttcccacattctccaggagtatgggaggctctttcctgagtgcaatgccagatggagcccaggatcaaagccgccagccgtgttttcatccccagaaccaatctaagctacaacctaatccttcattctgtttgtttttataaattcacatcctaaaacacatccccttcttgccttttttccttctgatatcatcagaatatttcaggacacagcctgcatttacacatctttcatgcaacttcatgtttattctgccaagtgcctctgaagaactgccatttgtgattaaaatccttccagcttcatcttagctttctagtgattctgatcaaattaaaatgattttatgtttaggaattgtggcaggtcagagagggatttcttattgtattaaatgaaggaaatgtagtcttagctaaactcaaatgtcaacaccttcttaagattatgctttactttgaaaacatcatctgcataatcatgaaagtttattcattaaattacacatgcacacacctatataaaatggtgccagctgtagatctgagcaatatccaacttacaacttaagttgcacttttcatcctctgaggaacctgctattacaatacacatctcacattgaggaaatgaggcacaaagaggttaaataacttggcacaaggtcacccagttatgaagggtggaagcaggaatgttaacctggacagcttacttagctccagagtcttcctaacaagaaattcttagcaaacaaaaacttgtcaccatttttagagttaattgccatttctatgaccacaggtttgataagcacactgcatttccaactcaaattgcacatggccaattacagtgccgacttcttacacaactcttcaggagatggctggaaaccttccattattgataaaaaattttaaatggagccatgttattataagactgaagtaaacaaaaattaaactagaaaacttttgggttatgtaaaatggaagctcctccattccaaaccattattgaaatattacaggccgagcgcagtggctcacgcctgtgatcccagcactttgggaggctcaggtgggcagatcacttgaggtcaagagttcgagaccagcctggccaacatggtgaaaccccgtctctattaaaaatatgaaaattagcaaggtgttgggggtgcacctgtatcccagccactcaggaggctgaggcacaagaatcgcttgaaccccagaggcagaggttgcagtaagccaagtttgcgccactgcactccagcctgggagacagagtgaaattgtcaaaataaagagagaaagagagagaggaagagaggaaggaaggaaggaaggaaagaaagattggttaccaaagctaaaattatcatagctatactctacatattgagacgtaattttctgggtgtagataaatttatttggagcgaatctatgttatatgaacatgataatattcattattcttttatcccctggcctttcaaataataatatatatgattagagcagcatgatacagtatttttactttaaaacttttagttctcttggctaaagatgaaaatttcttcagggatttaacctaaatcatgtttgtacatgtcatagtgatctctcttgcattttggaatgattttcatttctatcaatagaggccctaaaatggctcagtttaagtcccacagaaagtgaatccttccttaatacctgctagattaagaattttcatttccaataaagttacttaaccacttgttttgcacatctgagagtttctgcaaatgtatcccagctgtgagatctagatcacaaaagactctgatactttagatctattcagtttctagttttgtttgaaacttgcctaattttttccctaagggaaacattttctcctagttcaaatacaaaacaaaactgggaaaaaatattttgtttttctgtggcaaagtttttctttttttctcataccatttataaatgtaatataattaaagaagttttaaaagataaaaaaaggtagacattggtctgtttccttacaatgattttctatgcactgggattttttaaatatacctgtaagcatagtatagttatcattttgtattctacatttttttatgaagcatattaaagccatattattgtacactcttcacaagcatcatttttattgttgcatgagtgtcatatgtacgtagctatttcctgatgttagagcgtgcacaatatattccatttttcacattagaaatcatgttgctataaaccatctccttaggatagattcttagaaattgagttactgaatcttaaaggatattaatattttgaaactctttatccacatggccaaattacttcctaagatgattttaacagagtacactgtctggcaatttcctgcctgtgtttgatatgcgtgtttgtgtgtagcgggtggggtagggcatgttgtttaacttgtgcaatgtgggagagcatggatatggatcagatctgttgttgcataggggaaagagcttggttcaagctagttcaaggacctgactttttgtcctgactctacaactaactggctgtgagaacctgggcaaatcagcaggaggtttgcagacacacgcatttatccataaacctttgctaagtgctttttatgtttcttggtaccaaagagattagaaaatgaagtccagggttcttaggatattacactctagtgggggacagataagtggaggcagaatcacatgaagtttaagagaatgaactctggaagtagcttgctctgggttcaattcctagttattagctgtgcaagcttgcatagtgagaagtctcttaagctcagcttcctcatatctgaaatgagggtaataataccagtggcataggatggttgtgcagataaatgagaaaatggttaacctgcctggcacaacgtgagctcaataattgttaggttttttctttttttctgttttgttgctgatacgattctaataagatttagaaactaccactatgttttaagtggtagggagcatgtgtgctgcttcttcacaaaagaatatcatgtctttgcagcatgggtcttgggttctgagaattgataacatgtcggggagtaggagcaggtataggtcattataggtcatatctcaggggattttcagctccaatgggccgccatgacatcttcacagaaaccaaacggacccgcccccccccccccccgcccgactacccaaaattttgtttggtgttgagattgatgatgccatacttccaccaaaaggatgtacaaagttttattgttcacatgatgtgactttctgggggaagcaggactgacccccaggcaggtccataaaatggcttgagagagctgggactggctcagcgttctgtggtggttaggaggcggagctgggtaagtgttctcatgccagcaggggttgcatggtttgaacttccaccaacaccaagggagggagtgcactggccttgttcttgacttgcaatcagtaagcagtcaaacaataaaaatggagtcagactctttattatgtggggtgtggttttatgatggacaagggaaatctcagtagctttctttctttcttaaaaggagaaacaagccaactctctggatcccacctgttcctactctttttactgcagtgcttggctccccggtactcccagcactggctgtacagtagtctctgatccaagtgctcttctcccattcttaaaacacgtgcaatcagattcccccgactgctgctggaaactgctcctgtcaagatgatcacttactttcatattgctaacccctgtggtcctttctcactccccatcatacctatcctgtgagcgttagctttccttgtctttctttgtgactagttctcaattttctgaccccttaatgattggagtgtcccagaacctagtcctggggtctctgctcttctctatctgcactaactctcttcctctaaaatccatctacccataagtagatttctggcatctgtctcttcaggaacctcaggcttgtaagtccaactgcctcaatgttcctatacccaaaatggagcagctggccttctctttcactcttgctcctcctggagtcttcttcatctcatttaatggaaacttcatctgtctagctgctcgtgcccaaaactgcaccattacctggaattctttctttcatgtgcacttcacatccaacctgtcagctaatcctgtagactttaccttgaaacaatatccagattctggccattccttatcacctccactgctcccaccctcatccaagccactgtctatcctttagctgaatttctgccatagcctttagctgatgttcctgcatgtactttagcccccctacagtcatcaacacagcaggcagagcaatgcttttgtaaagtcattcagatgataccacagctctgttcagtactctgcagtggctgctcacgtcactcagagtgaaagtgggagtcccattccttcccagaaggccctaggtcccttacctcaccttctagcacctaccactctagctgttcctgatctttgctatttctggagcctaccatgcttgctcctatttcatggccttgcatgtgctgtaccctctgcctggaatgttcttcctccagatgtcagcatggctcacctatcacctccggcccgtatttgcccaaatttccaaatgtcaccttctcatgagaccttttctgaccaccttgatttaagttgtaacctccctctcacttcctatccttgttcttgctttgtttttcttcatggttcccaacactttttaaaagaatatacaatgtacttcttagttttgtttgttgtctactctcttagagtggttgttccctgttctatctcactggcctaatacagtgcctgataaataatagatgctcaataattatttgctgaaataaggaaggaagagagaaaggaaggaagcaaggaaagaagggagggagggtaagagggagagaaggaaggaaggagctatgtttgcaacatatccaagaataattgtattgcattaaaacagagcataggccaaattgcatgtggtcatttcagactgaactgtgttcccctggaatatttacacttgttcattagcatgacagtctcttttccagagcagggagtggcttgagaggtgtctgcatcaatcacacacactctgacattccatttgggaagggacaacacagtcctacgcttggtagagctagtcttcccaaacacaaatacaaggaccaattgtagattttggaaatcccagccaccactcacacaggagaccagaaataaacttagattatctttggaatgtgtcaacatccatgtttcaggactactgcattcttaaatatccccaagaactatattgagcagtatcagctgcacagctgtgagtggcgccaaggactattttgtttgggtgattgttcactgtaaaaagcacagtagggattggagatatttttatttgtgaaattttgaaaacctgtttcataggtatcttggttgtttttaacatggggcagttcacatggagaaaacaaccggttaatttgatttttttttctgtagataaaggtgcaccttactccaacttctgaccacagaacctggtaaaggagtagctggaggctatgtttggtacattctgtagtgctgctttgcaaattgccataatttggacaagaaagtagtggacaagaaaatgcaatttgacaaatgtctggcctttcgcagggatttcccaggctcccctgagtgagcggagcttgagaaagacacccaacatcaatattgcagtttgatgccataagctagaaattgagtgtcttgacttttgtaggaaaacccacatgtcagtcatttggggcacttacttctttggccagaagtggggagttgcgtcatatatcagcaaggaaaatacagagaaaagcaaatgaatatggaatatgagaagaaagtcatctagggcaagaaggaagatagtagctgggaacttcgtaatagctgcttctcccttaggttttacactatttacttggatcttagttttacaaaagttttaaggagtttgatttaacaaatgttccattctctcaagaataaccctaccatactttctaaagtttagcatttgagaaattggactaagacttttaaagttcgtatttaaggaaatggattactctgatggtaaaacatgttgttgttaatattgactctctcaaaaactgcatacaaaacaaaacaaaaaagcaaataataacaatgacgtgttgaaatgcgcgagatccttaatgcaacacaaagtcttcctctatgaggtggagtatcttttatttctatatctaaaaagtctgtgagaaacatcagaaattagccacaatttttgacatcagtctcagcagaacagctggtggtatcatgtgggaaggacagcaactgtagcattgcacgatcagccaacccaggaagcatcaggttatttatttgctgctaaacaaggtactttggtccatttcagcgcacatacaggcctttcaggttgggtgaacggtgactgttttgaatgaggcaaaattgtattctaggaggggcagtaagactgttccttcggcacttctgtgtgtctctcacatcgagagtcgccatctgtccctggagaataatcggcgtggcagctgggcatggtgtgtcatcagagacaaggaaccttgtctcagatcagaaggcagcaggtttggaggtcagcagcagttttaggactgagccaggttaatcgttgacacctgatgcttaaatggcctcaaataaaaccaggactatacagcttgaactagcccaattgcaggaaagacggcaggtcccaccctgatctttctcatttctttggcgccatggcaatgtgtttgcgtttagttatatgtctttgttgtcttcctcctctttcaggactgaaaaccataaacaaagaatataacaaacagggcaattcttaggaaaggcaaggatgattcatttggcagtatgcaagagggttcaaagtacataggatcaagcaggctgggttgataaaagataaccacccctttgattatcattcggcaattggagcttatttcacttagcatttctagttttttctcttcccaaaaggaatagagaaccagctccacaatgccatagcaaaaaaccagagtggacatcaccgcacctccttatccaccagtcccctcaaaatccccatagaagcttttcaaaacaaaatacacacacacacacacacacacacacgcacacacacacattagacacagaaataggtagtaggcatacccttagtataccaccaaccaacattaaaagtattttagtgtgacccacagagcgtgaaaacaaaggaaagtgtagatttcccacaccatccagggctgtacgaatggctgcagcattttgctgcgtgttcctggatctgggcaggatttaacattttgtggctttggggaaataacgggacacccagggtcatcacccaacaccagtaccccagacatatgttcagggaatgagccaatgggccaagggaaaaaaaaagagcatgctaactcttcataaaagtcgaaatcatttctgatggaaggaaaggaagacagagagctgctgaaaaatgggcatgttttttttttcctgcaacagaactgtcctgaatgtcaagccaatgttggcatcatggtagtcaccagagaagagttaatagaactcttcttttataggtaggttaaaaataatttttctgctttagatgtttgtaaaattcctctaggaacagagaggaggaatgagtctttgtgtcagtgggctgtgggcagccagcacccccagtctgccacacatgtggtgccagggatttccatggaaagaacctcaggagacctgattctgggcctgtttcataaggctagcaggctagtgagggccctaggtcataattttaaaatcatactaatatacatccaggtgtgtgtatacattctcagggtagcaggaagaaagtggtggcaagcgaggctggaaaggtggcaggggccagaccccacaagcccctgcagggcatggtatggatttttgcctttgccttaaatcgtctttggaggttttaagtggcatgatgggaggtgggtgtggggtgagcatgagcagaaacatgatcatattttgtgtttgaaacaacgttaattcctttggaggggatttagtcaatagcactgactacgttcatactttcatcttttctggcaatccccttgaactgaagcacttgagattagtgtggtcagtctcaattctaagagcacattacaatcccctggaggatttttacagcccagcccccatctccagaaatttggatttaattgggcagaggtagagcttgagcatggggtgtttgtgtgtgtgtgtttgtgtttttttttttttgtgtgtgtgtgtgtgtgtgtgtgttctaattatcaggcaaggctgcgacccacaggttcagtggaaagataaaattggagtcctcaaagtgtggccccgagacgagcaacatcaccatcacctgtgtaccgatcagaaatgcagattctctggcctgatctcatactgactgaaccagaaactctggggctccatatgttttaagaagccctccgggggttctgatgcctgcaggtataaggcaggagaagctggagtctggatctgcttccagatttagttgtagaatagctctttgataagaggtaattgtggaacctctctggcccttggtctcttcccctgtaaaaggtggaggagggattagacaatctcaatggttaagaatttatcatccatgcacactaaatctaataagagttttataatatactttaaaaatcatttttatataatggaataagaacatagtcattgtaggaaactcaaaaaaaaatgcaaagaatatagaagaaaataaatgtcaattaaaatttttccacccagaagtaactgttgcttatcttcagcagtttgagtgaatgtattttgaatatattttggtgtgttttcttctgatattttctgtgcatacctacttacaaatctgggaattatactatacatggctcaggagcctacttctcacctaacattataccagaggcaaatcttctcatcattaaatgttcttttaattgtctttgttaatgtctacataataccctattacattttatgccataatttatttaacttttcccctatattgactgtttaggctttttcacatttcttgatattgttttgatgaatatctgtatctctatatctatccatctatctagatcttagtctgaagaccttttcaagagaatcctagaaatagaataattggatcaatgcacatgaacttttcccggcttttgatccatctccaactttttttttccagacacaggccagttcacacaaacaccagtgggatattaaagaactctcctcaccacaccctcatcatcattcgtaatattgattttcatttcatgcactgccatgaagcagagaaggctgcaacagcaggacagtgtttggaataggagtatagctcgggcagtcaacacctaaggaagattcagactcaataaacagaactgtagagctatcagcagcacagacactgtggttggaatacagggagacatacaggaccaatgatgacattttcaaagagccctccttaaaatgtagcactggaatttacttgaagtttgtggaaaggttgtggattggtggcaaatcaccttctctagaaattggtactgataaagcacaatgttgtgctccctagaagctgagaggtggtcctgactgaagccaggtggaggaggagccattgcttagatgaacctctaaggtcccttctgggcttatgatgctaggttattagagccagtgtagtgagaggggtatttgtctttcttctaccattcctttcctgggcactttgtatgtccacagacacccaaaagggctccattttcccaggtcttcctgcccattgacccaccctttcctccttgtctatatctgacaacctctcattgccttctcgttacttgattccttcttggatccaggatcctaattgtagagagaaagaagaacagtgagagggcttagaaaatagaatcccaacctttattcatcaaaaaaagaagaaaaaaaagaagtggtgagcttatgtcaccatttatttatagccccacctacttccagaagtatcttaagtggtacctgctttcacagtgggctcagggagaactaaagtctcctatttaaaaaccagttcagggaacaccagacctgctagtcgttgacagactataatggggaagagagtaattcaagcattcaaccactgcatattttttaatgtaagtattatggggatgagagactgtttaaacaatatttaaaagcatagatttagtgtatacccaaaagaattgaaaacaagcgttcaaacaaaacttgtatgaggatattcttagtagcatggttcacaattagccaaaaggtgaaaacagtctaaatgtccatcaactgataaatggaaatgaagtgtggtatatccatacaatggattgttattcagcaacaaaaaggaatgaagtactgatacatgccacagcataaatgcaccttgaaacatgctaagtgaaatatctaaagaaaaaagaagcagccagatatcaaaacccatatattgtacgattccctttatacaaaatatccagaataggcaaattcatagagacagaaagcagattggtgtttgccagaggttgggaggagaagagaatgagcagtggtactgatgggtacagggtttcattttggggtgatgaaatattctggaactaggtagtggtgattgttgcagaacattgtaaatgcattaaatgccattggattttacatttttaaatggttaaaatggtaaattttatgttaagtgtagtagaaggaaagacacttgttcttcagggctttgaggaaagataggctcagttagttgtgcctatattctaccacttaccagctatgtggccatgggcaagtcacttaaactctcagcttccatttccttatctgtaaaataagggtaattataacagtacctacctcgtagggttttaaatcttaaatgagtcaaaatatgcaaagtgggccgggtgccatggctcacacttgtaatcctagcactttgggagaacaaggtgggtggatcacctgaggtcaggagtttgaaaccagcctggccaacatggtgaaaccccatctctactaaaaatacaaaaatttgccaggcacagtggcacgtgcctatagtcccaggtacttgggagtctgacgcaagagaatcacttgaacccgggaggcagaggttgcagtgagccgagatcgcgccattgcactccagcctggatgacagagcgagagtccgtctcaaaaaaaaaaccaccaataaaaattaaaaaaaaaaaatacacatatatatgcaaagcgctgagtataacacttggcacatagtaagcatgatataaatattaatatttgtgttattaatttagcccagtattctcaactggagacagcgttgcttcccagggaatatttggccatgtctggagacattttttattacatacttagggggaggggctctactggcatctagtgaatacaggcaaagaatgccactgaacatcctgcaacgtacaggacagcctcccacaacaaaagattatctggcccaaaagaccattcgttccagtgagaatccctggttcaaacagagcatgtagggaaatgtgcttcatctcatgaatgtatatattaaaataggtcaggtagaaattttcattagaagaagacggtcagcaaatgtattaaatgtcccttgtgtatagagaacactatattagacattacggagcatataaaataaggcaaggagctgtccttgaggagctgagataaaaaagagctctgtgtgatggggttatttcagagagaagttttcgccaagagattactgtaatcagttttcccttaataagagggtgatctgaggtcacccacactgctcccagtaatgctcgctcaaaggctaacacttctagtcccctgtaaagaagcatcctaagggaatagtgttggttccttcacttgtctgaatgtgtcttgtgtttgggtaaattctattgaatcaatagctgaaaaagaaatcactgtcacaaatggaaataaaaattacttgttatacatacaagcacagacatgaaaaaatattaaatctcattgtattcaaccatccatagaccaaaaggaggagattcttttggccactttccatgtaaatagttatttgatcagattctaaaaatggtatattcatgtcattagtccagtccacatcacagaatttgcccttacacaaatggctcaccatcaaaaggtctctctcgctttgctagcagtgaaggttgggaaaggaccctttttgcttctctccatctttttacctgtagactaaggatgggaagccctgcaaaggtatgccaagccttcacttaacgcctgccataacagttgtccttcagaatgggacagtgggaagaagggccaaggggcctggtgaagcccattaagagagtagacccctggagggaaccttgtctttggaagctgaggcagtggatgggtggtcacaggagggactggagaccccgcaccatgcagtcctctttgcacaccttcttccacaaccctggcttcctatatgtacatgtgctttctagcaacttatatttattcagtgtctactgtggcaaggactcttattagacacttttgtagggggaaacaaaagcaaattaagcatagagcatgtcacagtgagttctcagtgtggcagggataagagctgttatagtcactataatacaagacagaaagtgacaagtgcaatcagaaaaatgtggataaaacactatgggatttcagaggacacagttggccttcagtggggagtctggggaagtccttttggaaagggtagcattagaatcagaatgtaaatgttggtgaaaatgtagatatgttgaaaggatgctagaatattctaaagaacagagcaagctaccaaggttagcagttaagtatgtcacagaagagatgttgtaggatttgtggaggggagtgtagggaaataggatgagctgggtacattaggatcagctcatgaaaaaccagcaatgccaggacacagttaagctatggagaagcatgggtggattaggaagattgttgtagagcgatgtgtaaggtggactggagagataacaagggtctgagttatgtggggaaagaaaggtagggagaggccagactcaaccagtatctgagataaagcatttgtcaggactgatggcaggatgaggcagcacatgggtgtaccgaggcagcaggacacagtgttgaggagcatgggcgctggacacagatgctttgtgttctagccctggttctgccacttaaactaggctgcatgtccttgggcaaattgctttacctctcagtgccttgctctcttcatccaaaagaatcgggaataaaaatcttgctcctcacacccatatgctgcagattaaatgagttaagtgcctttgacacattctaacgtcctctgacacagcgtaaattattgtgctcaatagcttaacgtaaaaattgggtgttattattgaaggtcatgagaggatgaaatgggaggatgaacttttgaaccaagttaaaatcatggtgtttaccaggaataaagaattacacatgggaaggagtgatctttggttactcttcacaaggctgcttggagggactgcagcatggggcccttgtttgagtagaggacaggactgcccatctacataaaggcccagttatctagatcttgttttctagttcctaaagcattaattttactgtctggcattagctgcattaatcttcaccaatgagtcaggagtactcccaagacatcaggatttccctgcttcttttcatggggagacctaggatcaaagaattagggtcatgggagaccatcaaacagatgatgcttttaagaggaaggaggccattttcataggcttgggcactaacagaatgaacactgaagatgttttatttaaaagaaaagcaattatgatgttttgattttaggtaaggaatattgtcttgtctgtgtgggtttgagcagagtttgttcgtgcaggaaggacaggagagaccggggagtgtcctgaggcaagacatcctgcctcttattctgcaactttgcagaactcagagtggaaaagctttgctctcctctgatatcccatttggtgctcagactgttccaatgtaatgcatgcataagaataaaaattaagctttcaagtgctaaggcagatttttaataaagagacataggctttacccctataagattaaacagtcatcagggtttaaaggtttaatctgttggagctcagcccaggatggggttcagagccccagattaattggatgcagcctcagactttgaacgtcagagctggctggggggtgtgtgcgctggtgtgtttgagtgtgaaatgtgctaataaggaggagagacctctcctttgcaatgtgctgcggcaggagaaagcaggctgccggcccctgcctccctgaatcctcagtggctgactggataccgcttctgggggttgctgtgcacatgaatgtttgctattgttccaggcgcacgtcggccttaagaaatagcacaaaacaggcccatccttattcagaagccgggccccctccatcactcaaactgggcctttcaggtcacatgccggaggctgctgcagacaggacccagctgcctcaaatctgccgcctaacataagctgcggttcgaaaatcctgacagcacagggcttcctgggctctgcagagcaaactggaaagagctgggatccaggcactatgttctctgaagaactgtggctggaaaatgagaaaaagtgtgctgtggttcggaagtctaagcagggcaggaaacgccaagaactgctggccgtagccttcggggtgaaggtgggtgtcaaaggcggctttctttggccccctctcaaactctttgcctgttcacagatctcctccctggttcgaagggctgccctcacacacaacgacaaccacttcaattatgagaagacacacaactttaaggtaagcaagcctctgcattccttcttctgttacaaaagggcaggtggaaaggtacagtgtatagtttccgtctggtttctgactgtaaagtcaagagacaatgaattcctttgctttccacatttagctataagcttaacacctgcgctttctgtcagttcaaactggagacctcagaaagcagtctgctcagtgcttatgcctggaaacaccttatctggatgttgacttagttttggagaattgggcccattgccacttcacgttcccatgtccagtgaaataaacacagagcatgcccagtctctctcagtcagagatgttctgctgagagctgagcagtacttttccactcagtaaagaatattgctgtctccgagcaagggaaaacagttgcctgtttctcgttttgtgttttgtcttttgttttcagtgatgctaactcctttcctttatgcgtagacacctgtgaaatcaaataatgacaggagatgccatccagaagcttttatttgtgctccgggtacggctagcagggggggcacccttggtcacagcctttatcctgctcaccagaccaaacaaaaagatctggaaacctggtgaggggttaagtggaatttcccaagtgaatttataaactggaaagaccgctatgttcgtttcagactggtacttgtagaaggggcctgccatcagaaaattatggcctgtttcctttgcccaagtgttttccaagaagggctggaaagggatgctgctgccaaattgtctagcttgaattgcagttgagaggaggagagacaggttagagttagaggcttcaccccaaaaagtgagctggcagtttgaaagttggggagagtggagatggaggatccaggaagaaaacaataggcaggagaagcaaaatgtgaattgctttcttttaaaaaaattcttgtttcctttagggtcagtaacccaagtgactcttggaattagataacccttttgtcagaggtgacgagggaaactgattttattctgttgctttccgatcctttctgaggacaaatattcatctattaaatatacattggtgttagtttggtctgtttccctgcatctgtttttagaaagccagcagctcaggcatttgcatgctataattgaactgaggaatggaattatacagccctacatacttagcattagggtgaagaattgcattgcataggtcctcttctatgccaaagcttttcatatttctcccgtcactgaatattgacaggtctaatttggagcattaaatgcctcccgtttttttttttttttttactctgttttccatttttatcctcattaattttttttggccttaagaaagtgtttttttgatttttagcagaaatccttgatttttttgcatcctgtggatacactactagtgatgagaggatggatcttcatggacttgtaaattctttttcttcctcttgaaaattccaattcatttggcgttaagaaattggaattatgccatactataatatgtttgcatggagtagcttgtccatgtatattctgtgtctgagcttgtgttaaaaacacacaaatatacatagttgatattttcaaaactaatttcagtccttttaatgttagatccctgaatggaaaattaatcttaagacattttaaaactaaaagataattaaatcttattttttaagtagtactgttgctaacacaatatattacttatcactggaaaacaccagcagctcttctaatatttgtttaaaaactcaaaagctattcaccgttaacagctcttgaaagaagaaaaggcacaaaatagagaagctgttcaagaggagtacacaagccagacaggagcgtttctcttccatgttttaaacagacatctttgaaacttagcagacctcaagtagctgtgacagttgattgtggcattcgatggtactgttggtgccactgtccttaagaatgagtggcaggggccagatgaggcatcccctttgtccttccttgccctttccaccctcaatctccccactcctcacccgcaactaactctaggtggaaactttacatggtttttggaagaacattcaaaaagcaggctcaggctataaatacagtggcaggtttttagggacaagccactgaactgaactaaaggaagaaaattcttatcctaggtccctgccatctgcttggaatttgtgtttcagaccttaattttacattagctttttatttacattaacttctaatgggctttattcagaagccttcttgatttgtaattcgggttaatatttgaggctactatgtgcatagcatatagtaagcagtcaataaaaagaacaaataatcacattttcatgctcatcagataataggctttgctaggtgctgtctgcacttttttcttttttttttttttttttttttttttttttttttttttttttgagacggagtctcgctgtgtctcccaggttggagtgcagtggcgcgatctcggctcactgcaagctccgcctcccgggttcatgccattctcctgcctcagcctcccaagtagctgggactacaggcgcccgccaacacacccggctaattttttgtatttttagtagaaacggggtttcaccgtgttagccaagatggtctcgatctcctgacctcgtgatccgcccgtctcggcctcccaaagtgctaggattacaggcgtgagccaccgcgcccggcctgcacttttttctagaggcctcctacctgacattcaaatttgccagtagagtttctcttcttaccccataacaagattgtttgccccagtcagaactattaccccaggtaaaaagccctttcctttgctctgcccaggaactttgtcaagaggaatgaatagaaacccccaacattccctaagttgggaccttgcgctctattctctcagaaagctcacagtcactgcctttgcttctcaaacaaagcttgtctaagcaaagtaaaattcggctctgagaacaaaagctttgggaaccaaaggacagttggcacctcatcgcatgcaataattgtatacttttcaacactgtgtgctgatgcaatctttgcttatttaaagcctggatttcctagggttacttgtacctactaggcactgagacgtatttgttggaggaatggtgaaattaacagactcctctctaaaatgaaaactgtttgtcaagagaaaaaccactcggttatttagctcattttataactgcatctctgtttatctagttgatttaaggaggcactctgctgtaactggaacagctctcttttgaatggtccaccctaataataccttatggctgagctctgaaaatcttcaggccagccaaccccagaggcccggcagtcggcttgctcggcttcctgcccacacttagcacagtgctgaggtagctttagcccgcatagtactcctggccacaccatgttcttccaaagagctcagctctctctgcctcagttccctcatctataaaatgggagtgttgggaggtttaaagaatacatgcgagtcacttatcgtggtctctggcacccagtaagtattcatttgatgttagcatctattattatctttttgtgcctctcacttgtatttttgtatctagctttttcagtcttttattttctaccctctcttcttcatggctttttttcttttgtctcttttctaccatctctttcttcttctctcattaattatatgtaagagaaaatgaaataaagcctgatggttatttccttgaatgtattccatcctgtagccaatactggtttatacccctcgtttgtttaaaaagtaaatggatgacttagatgatttagatttagatttcacacatttttctcctagcttttaaaaagtactttctattaaagctgtcataacaaatgaccacaaacttggtggcttaaaacaacacagatttatttgctggtggttttgaaggctgggaagtctgaaatcaaggtatgggcagggttgggtccttctggaggctctgaaagagaaactgccctgcagctctctcctagcttcttgtggttgcggcagtccttggcgttctttgtcttgtagacacaccactccaatctctgcctccatcttcatatagccttctctgtatgtctctgtatatctgtcatcttcttataaggttgccagccatgggatttagggcccatactaatccagtatgatgtcgtcttaattatatcttcaaagaccctatttccaaataaggtcatatgcacagtgacccagggttaggagtgaagcacacctttcgggggatatacgatgcaacccgttataggaactgtaattgacattttcaggaaccctcaataggaaggatctctagcctcaccctaaaggatgcattgtcagtaatgttaaagtttacagtttcattaaagatttttatgtccatgaaaaaaggtctttagatgtaatctaattgctcctaagtgtcaaccccttggtccaggcataactgctgatttccatggctattgattttaacatctgtaaagaaaagttttcatggatttttcttatcagtgcttcattgctctgatagaaagtggtgaaacttagttattctttgtctcttatctttaccaagcatttcttcattaaaagaggcaccaaaaaaactttaaaatagctggtgagcttccatttttagtagcaagttgaaagtgtctatttgctgtagctggttcatattcagagtatgtgttatactttataatcaaatttatgatgtagctattagttcacactaatatgtgtgattgattatgcaggactgggcaggtaatgtgtgagacctagtataaaatgaaaatatgaggttcttgttaaaaaaaaaaattgagactttcaaaactatgacagcagcacattaaaccatgctaaggacagggctctgtgcaacagcgcaggtcacatgcgccctgaagctgaccctgtggtgatgtataaaaaaacaggagtaaaagacaagcttctgtgagcattcaaagaggagggggctccctagtgctggagatcctgtgtaagagacagtgtggttgttctctcagccttaaccaagaatcctcgtgggtaggtggaaagttggctgaagcccaagtagataaatagatcaaggatggttatacaggggaaagaaagagcacccgggctatgcaaacaacaggagtgagaacttggagtcagaaatgtgccaggagcgaataaggtgcaggggagagacctcggggacagaaaggagtccatcacatttaaatcatcagttggggtgggccagatggtggaaagatgatgattcctgggccctggagccatcagagtctcctgagcaggcccttcccccactcagcctgctgcttctgttcccagcctctccagtctgcatggggatctgcatcactctttcctgccaaattctctcccacccccatgcacttccaggatacccttccttcttcccgatatggaatatggatggagagcagaggcccagaaagttctaacccccctcactgtgtgttccccactccctttccaccccccttccacctcctgcccagcctgtaccagcttcccttttctccctagcgctgatcaccagctgacatcgtacatatttatgtgtgtgtttgcctgccttccccttaccagagggaaactcccgatgggagggggtggggagagagggttcgtggagtggggatttttgtctgttttattgactgcagaaaccccagtgtctagaacaagtcctggcccacaagctgttcattcacgttggcagaaagcaggggaccgtatctccctacagttgagctttcggagccctctcctcactccctgccctgcagtttgccctcttgtgcggcttgtgtgttgtatgcacctgtgttcattgtactagagtccttccacggagtgggcccttgccagggtcatcagatggcgcaggagagatggaggccctatcaggatgtgtcgggccagctctcaatccccatttgccagggatggtgactgtgcagtgctaccccgtgtctgatccatgggagcgggcgggtaagggggaggagggatctgtcccagttcactacagctgtcctgtgtggcgcctttcaaaagcatcccatcaggacgtaggggaaatggttgccctacttactcttatatgtcccccactctgctgacagactgaggatgcaccaggagcaccccgttcccatggcacaccccatcgcgtgtgctcttgtagcatgctccttctcaacatgcaacccccaccccgtgctatcctggaggccaggactagaagttcaagaagctaagaatatgtccccacgctcccactaaaacacctgtccaggacgtggcagcaccaccacctcccagtttggatttgaggctccttgatgatttctaggcctttcattcatttttgcattcttctcagtctagtggtcatttgctttggaagaagactttttgcttcccgcatgcaagcccctctctcttcctcttcccccttgacctcataaaagtgtgtcagcccttcgtgtcattcccagcattttgtctgccttgccttcttatcaagctcccaggtgtctatcacccttttctgtccatctgatgctacttctgtgcctggagaacagggatggctggatattgcacctgcaaattgacacaggcagaaattggcttcagaatggttgggggcttgttttgttttttttttgtttgtttgttttgttttgttttttaagttaataatcagaaaaggctgttttgccagaaacaagtctggaaagaaaattcaaaacaaaggcaaaactcatcaccttaaatataaaatgagggactcaaagtgagactggaataaacaggtttggaaatatatggctttattaaaaaaatgttgtttctgctcccagagtgctatgaagaggagttgtttttgtctacctcctaattcagcctgctccacattataatgattacaaagtccttgttttcaagtaatataacccctggaaactatcttaagctaaatagactattatacaggatggtctcataaagcctccagggaatactcagaactcagggacgggtggaaacaggaactgggagtatacctggagccagtttctccctctcttcctccttccctccctcctttcttctttttctccttctaactccctccctctttctctccccctccctccttcctttccctccctactttcattatctcttccttcctctgtctctccttctccctctccttcctccagaggcatccagtagaggccaggtgtgctactaaacgtccaggacaggccaccacaacaaagagttgtgcagccctaaatgccagtagtgctgagactgagaaacctcactactggcaatggggagccactcgaggtttttgagcagggaagtgtcaaaaggatgtgggtgtcgatgtgctcataaacctgatcaaagttaagtagcatgaggacatcttactttatgcagtggggagactcccagaaagctttgagacaatcaatattttagaaatgcaatcctatcttaaactagggcagctgctaatgagaagtccagggatctgtggtgcccggtttgagaaactcagctctcctgccccatctccttggccagcctttcagagggaactcagagtgtctgtcatagattgattcacctctgctgtgttttcgtacatctgaaaagggtcacttcaaggttaggacttcatctggtcttgcaaaaggggagagttcaaagtttaacctaatttttcatatgagatgaatgtcacatggttgtgggaaatacagtaaattataggaaaagtccttggcagagatctggaagccttgactgtgctgctgacctgggtgacgcaggataggctgcctgccctccagcctctcagttaaccctgggcaaacactagactagacctccagaacccagccacatgtagctggaagggactttagctctctcttctgtgaacataaagtagctaaacaaacaaacaaacaaacaaactgcctctgacccgaagattccttttcaaagcaaaagaataaaattctgatttttaatatgaataataaaatgacaaattgaggcaataaggtttccatctataccactgcttctcaataaaggaaacttcacccccccacctccccctgacccctgggggacatttgtcaatgcctacagatatttgtgatttgtcccagctgggagtgctactggcatttagtgggtggaggccagcgatgctgccaaacatcccacaatgtacgaggcagacccccacaacaaagaattttccagcccaaaatgttaatcagtagtgccgaggctaagaaatcatgatgtatactggtaagaaaaagcaaaaattctcaactgcagcatgtcataaacggtacttttccttcttacagtttcgatcccaggctgagctgatattaatacatctgggtggtgtctacattgacccatcaaaacatatctggtataaaaccaccagagaatactgccttccagattcagcagctatgagacaaataacatcctgttcatttagaaagagctgtgttgagagatacttgctaaatgcctgagatctttctggatgactcttcttgctcttgtttttgcaaagtagccattcctgggccatttgtcaaacataccttatctcgtgtaatatcatcttttttgtttggtgtggtttttgaattccaggcagaccgtgcctagtgtaatagtcttggacagacattcttcctgtctggagtattttcttcctgtctagaatattttagttactgccctcaagttttcaaactgttctttctctaaaaagatattcttgcaaatcagtgaacttcagaaaatggaaaaagccgaccagtgaattttaagatacggtatatttcaatgaaagagtagacataataagtagaagccaaataaaatgggctcagagcatgccctcagcatttacacgtagccttctgtctagagattgtccttgtggatccaaaagaaaattgaacaatatatcggtcgtgaaaataaacaatggcccatcaccaaaaaggaaagtaggcaatgggcctaaaataatgtttcactttacatccttgctctattctcattttgttttattttttggggactgtgtggggacactgggtgctacttgctcttcgagacgtctatgcatttatttggctggacagaacagatcaaaggcagtagggatacttgttgggaaaggatgttggtaaatatggacagtgataataagcattaaaatgcaatcctgatgtgctcaattatttttaaaaatattggcaaaaaaagtgaaattttagaaaatctgtgattagcctatcctgtttttcctgaaacaataggccagtttatattttgtcaatatgcattctgtccacgtgtagtaaacatgtagccactcacttaatttctaaatattgcattttcatttttaccccaagatatagggatatttaagatgaggttatttcatccactcaagatgtttcagagaccaacgtgatgtcattccttttttttttttttttgaaacaccatttgccagaaaagaatgcctttcaaaacctaagcccaccttcattggcctttggttatgctgttttctcttctgtaaatgtcttcctcaagtcatctgctctccagtcaacaccatcacttccccacctgctcaatctttcccaggctggtgaattcctatccatccttcaaagcccagttcaatatccccttccgcagacttctaggaagaatttattattctctccattatactaccataggatctcctacgtgttctgctgtatcacctgacacataattgcctgtttattcttgtagataatgagatccttgagtgcaggcagttcttattcctctgatctatttcaactttgtatatccaaggactagtacagggccaagttcaaagcaggcaatcagcatgtaaatatcaaacaaacgagtgaataatgagttgctggaaaggtggaaataagatgaaaataggatataattcatctgtctgacatccttcccccattaatttgtaatgccacttctgagatataccaagtatccatatatgtgtgatttggtttcttgtctttccagtgtatactactggtaccaaatgtactgtaccaaacatactgggctttggctctctatttgaaatgttattatattatattcagaatatggtatgtatggtatcagttttttgtatatgttgaagcttaatttgtggtcaattgatacgaatattccaagtggttttgaaaagtgtgtgtgttctttgaatggctggatatgagatccctttcgtattcatagatcaactttagctatttgatctactagtttctgtgaaagatgtcaaaatcattatgattgtggatttgtcaatttatctttgtaagtctttcaatttcgctttatatttttgagaccatattgtcatataaaagctcaaaattatatacttctggtaaaaataaatctctattatctctatcactaataatgcaaatatatatatttgctctattttgggtttctattggctagtttgctgggtatggctttctttcttacatttctctcatgttatgttttagttgtgtttcttgaaaggatttttaaaatgttatctaaaaatctttttttgtgatgaattagagccacttattctgattagagttgtataaggattttttctacaatcactgtacttttctattgcatcttttttctccttccctgctttttattggtttaattaaacctatatttctttttcccttatgtatttgtgtgtgtgtgagagagagagacaatctcagtctgttgtccaggttggagcacagtggcgccatcatagctcattttagccctggacacctgggctcaagccatcctcccatgtcagtctcctgagtagctaggactacaggcatgtgctactatgcccagctaaatttcaaactctttttagagatggagtctcactatgttgcccaggctggtctctacctggcctcaagtgatcctcctaccttgacctcccaaagcactgggattacaggcatgagctaccacacccagccatatattctttttgattaatggatttcatcccacccttttttaaattatcaaaaatttaatacatgcataattgacttcaaatattcttcagttaattagtagctcttcttacatttcccaaattaagagaactttagacttcttcatccccttcaaacttccatgtcatttttttaccccatgtttaagtcccctacagttagtcatcttgttattgttgtatgcaaatagggcatgattagattgacccacacttaccagttttcttgctcaccactgcttctggaaatccttcctcctagattcaatttgcttctcactgaagtatatcctttagtatttcttcaagtgatcatctgtgattggaaactcttgacatttgtctgaaaatatctttatttcacccttactcttagatgataattagctgggtgtaaaagttaggttggcagtatttttgtcagagcactttgatgaaattattcaataatctattcatgtcttcctgctgaagaaaactctatttttacctatttctcccctttcaaagataacctgttttggtttttgttgttgttgttgttttaggattttgctttgtcttttggtattctgcaatttcagtataatggcatagatacagattatttttatttatctgatttgagtttcatttagcttttttttaatctgaatattttgtgtctcactacgaattctggaaagatctcaactgttcttctccttaaatatatattgcttccacagataccctaaactccatcatttctcaacttctgaggatcatcactcctttgcttatcttttctctcttctgcatttccagtctcttacctattgtatcaagttcatcaacaagtcaacttgccttggtgtttcccatcttttaaaaaagtccttccttgactccacatctcccttgagctatcctctgtctctgttgaacatcatagccagccttcctgatagaggaggtacccacatatttctctacttccttaccttcttcagttcagttgagtcttacttctaccctcagccatccaaagagattgctgttgctaaggttgctaatgacttccatgtatctgagtcaatatttagtacttatttcattgaacctcttatcagcattcaacataattgaccattcattccctaaaacattcttcacctcttggcttctggaacactttgttggttttctctaaatgtttgaacactgagtgctcagggatgagctctcttttgttttctgctccctacctttaatataatcatgtgctatataacaatatttaggtcaagaatgaaccacatatatcatggtgaacccataagattataatggagcttccctatgtaagtgtaccattttttatcctttatactgtatttttactgtaccttttctatgtttagatatgttcaggtacataaatacttactgttatgttacagttgcctacagtatttagtaaagtgacatgctgtagaggtctgtagcctaggagcaataggctataccatataccctagatgtgtagtaggccctaccatctaggtttgtgcaagtacgctctatgatgatccccctcaatgatgaaatcacccaaggatgcttttctcagaatgtagctccatcattaagtgatgcatgaccatactttttgttcattcacacaattttaaatatcatctattcatcatagatggtgaaatttatacctctggtctttgctcctcctctgacctctcaaactatgagttcctgcttgacactaacacttggatatcatagcagcatttaaccctaacccatctaaaatggaattcttcactttctccccagaagagtgtctttcccatctcagcaaatggtatcatcatttacctagttcctaagctagaatctcagagtcattcttgactcctgtctccctcaaaggcccacacttctactgtcaggtcctataaattctgtcttcaaaatatacctcaaattcttccactttccatctccactgccagcatccaggtgttaggctctgtcattgttcaactagactacaacatagttttcatatctattccactattaacaccctctcattcattttcaacacagttgtcagaataatcttttaaaaaaatctatgtgaagtcctccaagaacttcctactgtacttagattgaaacaaaatccacactcatgaataaagcctttaaggccctgtgtaacttttcctatcctaccttcagcttcactccaattcctctccccgcaacttttggtgttctggccaccctggccatctagttccttcaccacaccaagttcttttgctcccgcaaggcctccatatattccttctgctgggaatgatctctgtccctttctctttccctgtggaagagaactggctcttcttttacatctggtcaccttccaaaagaggctttcctgaccattctggttaaggttgggccccacttggtctctctagtagcagcctcatctttttttcttctgtagccctttttatacttttttttttctggagttgcattttacatattattttattatatttaattgatcttcacagcagattaacaattgactttgctgccataattaagagcatttctagtaaaatattaagaaatgtatgattgctgaatttagaaaatgtccaactttagataggatactttactgaggaactcttttagtactgcattcaatcttggtaggcctctaagtgaattatgacatttggccctgtaagtccttctgggatgaattctctgcattcctgttaaaaaatgctttgtcatttcttagggtcattccctagaaaaatgttgagaaatttttggcatcattttcaaagcaggaactatataataggcagtttgcatatgataaactgaaataccagaaagactactataacttcgctttattacagagttataagttgctcttttttatttattaactagcttatcatctttctctgcttttactcattggtttccttagaagagatccagatccattttgtttgcctctttatgtacacccaattactaacatgtatgaataaagaactcaaactgaggctctttttttcttaagcagaactcggatgaacacctttccaaattgtgaccacactcatcatcctgcttttttgttaaataaaagcagtttgtaaaaaaaaaaaaaaaaaaaaaaaaaaaaaaattgtctacatttcttttgttaatagaggtttatgactttgaaaggccttctataatgctttataacattttaactttgtaaaaattcgggacatttttgtgcacatttgtatggccccgatagactgcctatggtcattttagattgaccatggccacatttccttcttaaagctctttgatgccagtatttttgctttgttttgttttcattttaaatcataatttaatacaggaggacctatgcctcaaaataatcagagataagaccatccttactttgtgatattcagaatatttaacaactggctgggagcatcaatcaatgagaccagcactttggtcaaccaggaaagattttcagcttacttacctgaaggccacaccaagtcctactgaatatggaaactatctctggggaaagcaattccacaggccttattggttgcctccatgtttagccaactcctttactttttaaaatgccttttttggaagtagctcaaagacttggaaccttttaattatcccataatcatgtcttatttatacctgcctggatagtgtagagatgggaaaacttcagtcaaaaggacacagtaattgagttctgccttccagaacttgctgagctaaatgcaggttatagcgaccagcttgggctatcttgggtttgtccacacagtgccttgttgtgggtggtcacagtcttactccttagctgatggcatggcctataatctgtttctccacgttcctttctgactctgtcctggggcatggtggatcgatgaaggattttcaaagatcaaagcacatctctgttttctcaggatctgtttgcaactgctttactggaaggaaaagcccagtgggggatcgctcctgctgatcttcattgacatgtctgaggctacctgcctttaaatgactctgagctttctgacatttttcttctttttggatcacaggtccacacgttccgaggcccacactggtgtgaatattgtgccaatttcatgtgggggctcatcgcccaaggggtccggtgctcaggtagacacagaactttcttcttttccaattatatgaaatgccactgtgctgagctggaggatgtctctccagagctgggaaatgtgctcagattagctcaaaagtctagccttctgcagggttcaaggcctgtctgtgcttaatggggaaactatttcaagtgtttgcaggaatgaaaaagaatatatcatgtttatgcaagaaaagaaaaaaaaaaacaaaaagtacatttccttaaacacctacctgcctcttacaataggcagtagtccgtaaaagaaaaaaaaaatcaattccaatggaactgcatagctagaaaagccatactttgtcctaccccatcttgctacaaaaggtaagacataaaaatagtaatagtgctggtgaatatttaccacataccaggcaccagttaatctctatttatcatgtcattagcctcaccaacagaccttgggggagatgcaattatcctccattaaaaaaaaaaaaagacacagaggcttgttatttgcccttggctacgcagtaaggaatagaatattgattcaatgggagccagattccagagttcatgctcagtatctcattgtcatcagattagcagtgaaaccatgcaccttgatttgatatcacatattttcaaagtagtttgaaagcctgggtgattttccatctggaattggaggtatacacctattgctaacagcatacatcttattaaggtacatctaacacaatgataaatgatacaaattaatgtgtaactgggtttcctaattcatgttgccatggtttttctggcaaacacttgtggctgggagcaagaccagcctcctctgatattgatcaggtttctaccaacaccctgactgacttcttccttgctaggatatgatttttaaaaatctcaggagcatttagaatacaataaggtaatgacactaattaaggtgatctttcccattttggctcacagcatcccgtaaaccctaagtcctcctctctgcctggaagaggcttctagcttccattgtgtaaatacaccaatcaccggtgttgatacctggatggttcaagtagttccacctcccccattgcaggtctatgtttaaggggtggtcaacatagctcagaagcagcttctccataaatattcagaaactctgtttaacactaaagactgacttgccaggagccacaacgtatctcccagctcagccactgagcaaaggggtagaatatctgaattactcagtggtcattaatttggcctgtccctattgtacctatcaaaaatatccctaattgctggtattaaccagtttcagcaagaaattggtccaaagtcaatattatgagaacaaaactctgggcttcatattagctgtgaacagcaacttttcaagtttctctgggataaaagcgtttttgtggggtttttttctggttttgtttttttttttaaataagacattttctgaggccatattgttagtattttccaatggctactttttggccttatatttcctcttagcagcagggaggctaaaaactgatcatgaaaggttaggaagaaccatcattgcctctcagctttccatatattacatcttttaagtatttttagaatgcactggactttatttgtagaatatggatttctactgctttgtaaaaaatggagcatttttacatttgttatagaacatcttaattttaataaaatatcagtattaaactctacataaacacattgttgctttaggtcttaaatgaacatggatgattcctattatatgtggtacctagggcagcaattccaagaggtagaaagttgaatggtagttacaggggatgggtagatggggagttatattgtttaatgggtatagtttcagctttggaagatgaaaaaagttctggagatggccggtggtagtggttgcataacagtgtgaatgtacttaatgccaccaaaccatacacttaaaaatggttaaaatgataaatttatcagaatttaacaaaaaaatttaaatgaagtttgtaagacatactaagaattcctaatgaaatcacttcagaattgctgggcagatatacttacatttttttatcaccatatttgctatttattttatttgacctaacatgtatacaatacttaactatatttcagacactatgctaaacactttattaacttttatttgagcctcatggctaatgccaggaggtaggtgctattatgatcttctatagaagaggattcaacaggaaacccagccaactctatttagcgcagttagccaaaatttacattcactagatagatgtatcaaaatattattgaagtcacttgagctttgttgaatttctcatgttgataaagattaattagaactgtttttgttttttttattttgaaaggaggtagacagagaactcagccaataaaaattacatgaaaatcacttagaaattaccactgattttacaaaagtttagatcctctcaagttcttggtgtgcttaagtgctattttataaagcagatgactacaatattccttatcatgtgtgcacgtgtgtgttattctttgtgcctaggaaaacagtattagaagatactttgagtagagagcacatcaactttgaacaacttcagcattgaatttttccctttcagaatgtagcagaatgtagactatgctgcctttttttttttttttttttttggagacagagtctccctctgtcaccaggctggagtgcggtggcgcaatctcagcttactgcaacctctgcctcctgggttcaagtgattctcctgcctcagcctcctgagtagctgggattacaggggtccaccaccatgcccagctaattttgtatttttagtagagacagggtttcaccatgttgactggtctcaaactcctggcctcaggcaatccgcccacctgcctcggcctcccaaagtgctgggattacaggcgtgagccaccacgcccggccaactgtgcctttttatcatcagagaaattccgtcagtggatattgactgctaacaggctcttcgtgttttcattgaactttaaaagcacccttttcagctttggattttcatatgaactttataaataatcatcacattacattacatggtattgttataaactctcaagtactcctactggtgtatatagttaggcattatttccactcacaggtgtcaaaataaggcatgtagaaaggaaagcggcctacccaaactgcccaaggaggaagggattggaaactatggggcaaccttccaggaaaggggaagaggataccaatggtcgtgggcttctcaaagcaaagattagagagtcctgcagaaagagtaactctgcctcccacacaaggagcatcaagagcttaaaggaaagagtctggaacaaaccctaggtgccctttataagccaggactgtctgggaatccaaacccgaaaacctacttgtggacccaaagggttccagcctgaaacaggaaaacatatacaaaaaaacctgatcaattacctaagctgtctcagatgttctgttcttaaggtccagcgacagagaaggcttaacgagaaaaatggaatcatataagggtttagtgattagagatgatacttgtatttatcctgtagagagtcctagaaacgggatagatgttccagagaaatatgtcaaacccttgggtggtgatatttttatttttggcaacatataatttgtgttgtgctttgacaaaagggctgggctaggctaatgtggcttctttgtttacagactgtggattgaacgtacacaaacagtgttccaagcacgttcccaatgactgccaacctgatctcaagaggatcaagaaagtgtactgttgtgacctcacaacacttgtgaaggctcacaacactcagagacccatggtggtagacatatgcattcgggaaattgaagcaagaggtttggaaaatacttcctattatagtagtatagtgattttatttttattgtttgtttttactgttgtcaaggaaacagagttgctctactactcttgttgggaaaatgacctacgcatgtgtgcgcacacacacactctctctctctcacaggtagactcaatccaaccagctatatcaatttccattgtatatataaaccatgcatatatgcattcaaaaaatgtttactgaacatttattatatggtaggcattgaggtaataaaggtcaccattctcaccttcaagaaattcatacttcagctgggtgcagtggctaacgcctgtaatcccaacactttttggaagctgaggccagacaatcacctgagcccaggagttcaagaccagcatgggcaacatagtgagaccccatcctacaaaattcttttaaaaaattagccaggtgtggtggtgcacacctgtagttccagctactcgagaggctgaggcatggaagaaattcatactttagagtgggcaatcaggggagcaaataaataaacattgtggatggccgtgttcagggtaccatggagtcacaaagcaaaatgttttaatcctatttaaggacggtgagaagggttatggcagaggtgaggcttgaattggagctttgaaaaaaaaggtgcttctgttaaataagaaattgttgagtaacacatacatctcctaccacataaaaatgtgctcctaatattcatcgtttatttcgaagaggagagttcaaagatttaaaagatctatgcaatgaaaaataaaggaaacaaggaagatagaaacattccaaaaaatgttctttatgttgtacatgagtcacttttcctttatttgtgctttctttggccactgttcagtatcaaaatgttcactgaagttgccggatataatttgggtgatttggccatgtatagagcctttctataaggcttaaaccacttttgccatgtatcatattctgttatactggctatccattattgtgtcctaattggcttaatatattttatacatatatattcattggtcaactaccccatttttccaaagcacaactaaagaggatgtcatagcttattatcccaacccttttagagagaggaaattattcccttttctatggagggggaaaaccatagctatcctgttccctgagaacttgctaatttaatcccagagtgtaagaaatgccttctatcttttcaccactgtggctgacagagcttaatgagtgctttgggatctggtgaacatattaatccagtggctaaactgggtaagaggaaaggagggattccctgcctctggatgagtggttgggacaagtgaccctgggccctgcagtttggggtcagattatcagcctctccagagcctgcagtcagggcttttctgaagaagctggggtcctcccattgtgatccttaccaaagacaactgataattcaggcatgataactactgacatgtctaacatttaagaatagggggcactgcactaagtttgcctagtacaagagcgagatagagtagcacaaattaggaattgatgccaaaagagtcacagcacagggattagagccccagacaggtattaggggcctaagcatgcaagcagaaccagagaatgcaccgggagaaatttgtatgacacccgcattcccagctgtggggccaccactaccaacacttttccctgtcttccatccataaaaaatccttattgttctccaaatgttcttttatgttcatttgtctctgcgtgatgtggcagagtgaaaagatcaaggatttgaagttaaattatcagccctgtctcttactggctgtagtatgaccttgggcaagttgcttactacatttgcatatctgtttcttcatctataatatgaatggaatcaactgtacctcataaggtggttggtgaggattaaagtgacttgatacataaatggaccgagtacaatgtccaatctactgaactcaatctatgttaattttgccttttcttggaatgacccacacccatacctccacctccaaatctgtctaactatattatgtagcctgtacatctcagtgctgtcacagagaccctgagtaacagtgcctttgacaagatagaaatctatttctttgcccagtaatagtccaggtacccaggagcagtccaggaatagtctgttccaccgtggcaggaacccaggcactgcagcttgttgctctgtcctgcttgagtgctatcctgcgtgcacaatcacagttggccaccaccatctcatctgcatttcacttaacaggaagtggaaaagagcatgctccattccttcaaggccacagaagctgtaaatgtcacttctgctctcacatgggccagagtttaatggccactgcaatggatattgttctaaaaatcaaaggttccattacaacagaagaatgggagaacaaatattggaaggatagctggcaacttctgctactctggcaaactctaaccatcctttatcatttccttcaaagattagcttcttaaaaaagcatctcgatgtaatacagggtgacgctttgctcagtgaagcatgggctaaagtcaggaaaattacccccatttaattataatccaaaccatacaacttggcatattatataaggcatagatttttttttttaaaagtgacgggatacatgtgcagaatgtggaggtttgttaaataggtatacatgtgccatggtgatttgctgcacctatcaacctgtcatctaagtcttaggccctgtatgcattaggtatttgtcctaatgctctccttccccttgacccccaccctccaacaggccccggtgtgtggtggtcccctccctgtgtccatgtgttctcactgttcaactcccacttatgagtgagaacaaaagcatggatttttctacgttccttgaaaacctggatttctttgaaagtgactcagtgaatcttatggctgaatgtttgtgtcccctgccccaccaaatttacatattgaagccctaatctccagtgtgattgtctttggagacggaggtctccaaagaaataattaaggctaaatgaggtcctgagggagggaccctaaacattatgactaatatccttatgagaagagacaccaaagagcaagctcgctctctcactctccatgcacatataccaaggaaaggacgtgtgagagaaggtggccatctatgagccagaaagagagcctcaccagaggccagaactttgattcatccatcaacaggcagggttcattgttcactgctaggggctcccataatccactgggtctgtgcctctgtggcagtgcatgttccaactggaatgagatgtgctcatatgcaccaacatcttagaacaggatgacccacaggtttcgtcttgtgtggcaactccagttgatcagtagtggtcacctgaacaattggaactgagatgaattctgaggctaaatagggctcagtgggaaaaagggctgagatcaactaagagtatctgtcatggtcacaggagggatgaggggaagtattcgtgatttacgccacgtatttgttgtctctgatgcatacctaatgaagacccttatatatggcagataatacatactccataaatgttttccaaatgaaaaaacaggagaatatgtgagttatcaagagtttggcagaatatatggcggcagcagcagaggctatttgtttgctcatttttactgtagctatagttttgatagcagctagtttgtgacatacaaagtctgaaacccagtcctttatccctgctcatacttttgggaactgactcgtttttaggacatatcttaacaaatcaataagctccagggacagaaaccatgtctttttttcttagcctaaatttgcagtgatccaatttccagaagcaataaccaaaactttattttcctgcatctgtttgtataatcagttgtctaaaagtataacaagtaaccgtttttaattaaacagttaacatagtcttatttacaagtaaacatgaaaggctgtaatagtctaattttttccaatacaatcagagtaatacagattagatacccacatacatacatgtgtgtatctagtacagtgctacatacaatatagcacatggattaagatgatgctaggtaccccatttgcgctgctgtgattattacacatcttatgcctgtatcaaaatatctcatataccccataaatatatacacctactgtgtacccacaaaaattaataaagatgatgctaggaagaaagccaggttgcttcctacgatgacgaaattcatgtccatcaagctcatgaacacaggaaaggaagtaagggaacggtccatgggaatcttaaatatcagttctctttgcaaagcagggaaggatgaagactggatttccattgagatctccactgctacatgggcaaatgagaacagacttgcctgggaaattgagacagacaagtccaagttctgatgcaacagtgtgtgataaataaaatcactgtctatgtttgctcattttctgatagcatgtagtatagacgtgaaattagtcttttttttttttttagatgtttcaagaagctaaagtcagtctctctctctctctctaacaggattaaaatcggaaggcctttacagagtctctgggttcactgaacacattgaagatgtcaaaatggcatttgacagaggtaagcttgtactttcttgaatgccatctgacatcctaacacccttctcgattggaagtaggttttaatcatagtagaaatggggtttcagaactactaagagttgttcttcaagaaacggaggaataatggcttacaaatctcatgtttctgcctcactgggtgaagtgttaccttcacagccattgataagtgatcactgtcaatgggcagacaatccacatggcattggagtacccatctgcatcccctgtctcagaatcccattcttctcattctctcaaagctccaaagaagggatcatagggatgggagggcacccccagcactaatgtaggggaaggcagtggacatgtaggagggaactgcttttgttctttataactgtggtgtatattctctagaacatactatctcttaagtcagatatcatggccatcctggggatcctgttaaaaatatgggtcactgggacccaacttgaagactcattcagaaagctggataagcccaagaatctgtatttttaataagcaatccaaataattctggtacagccagtcaagacatggaagccctactggatagagcctactggatagagcctctactttgtagtgtggtatgtgaaatcagtgaggtagccctccctctctcttcagacttctctccagttcctcctccctactgtactgcacactccagcaatcctgaaatacaccctatttgttgccatgaagaagtgccttggctcacattgtcctgtctatctgaaatgtattcacctctctgcctggcaaacacctgtaatcaggggtcagctcaagcctttcctccttgaggaagcctcgctgactaccccaagctaacctcagagctccacttcctttttccacatccccccacattctccacacttcttcagcatagcaatcttcctatttccttgtcattgttgagttgcatgtctgtcagtcagtctaactagaactgttggttggcagagagtatctcttttccatggttcatcagggcttaatggtgcttggcacatgacagattcccaataactgtttgctaaatatgtaaataatgaaatcaacatggcatatcttctatgcttttactgttttctatacatcggcagcttttttcatcttcagaaccaaatttgctgaggcatttattcttttaattctttatgcaaaagatattaagaattcctatatgattaaaacatttttatctaaaaaatgtcatagtctgtgacaaattggagtggtatttcctaacggtaaaactaaaagtcaaaaaatgtcttgagaactattgttagaaatggtaagaaatataggccaggcacggtggctaggcctagaatcccagcactttgggggttggaaacggagcaggtcaaaacttctgtgctgatcctttgtactgcctacaaagaaataattctggaccaacaataaataccagatacattagtataatatatttaaagtgctgaagtgaaataactgtcaaaataggccaggcgtggtggctcacacctgtaatccgagcattttgggaggctgagacaggtggatcacttgaggtaggagttcgagaccagcctggccaacatagtgaaaccccctctctactaaaaatacaaaaattagccaggcatggtggcacgtccctggaatcccagctactcaggaggctgaggcacgagaattgcttgaacccaggaggtggaggttgcagtgaaccaagattgcaccactgcactccagcctgggctacagagtgagattctgtctcacacacacaaaaaagaatgataagaaatataacatcacatatccaagaggaaagggtaaagtttcccagattaaagtcctaggggatcagggaggaaggatcaagttaaaaacaaacaaacaaacccttcagtgagcctgaaagaaacaataagaactgaaactattcaacaatcattttgtgaacgtgacttccaaatccaagtctaaaaaacactggtggagatgtattagagcttcttgatgttctcttgtttcagattagattgtcattttattatgaaccttagtgtccataatacaaattattgtgctaaatttctatttagcaaattaccaggggctgggacccaaatcactgtttgaagtttgttttatcacccgtttgcctgcacaaaccctcagaccctacctccctctcaccaaactcctttctgttgcctcctacacttcagtgttactagaagccaaaagagttagctgagacttgtcagggagcattcatcgctggattttttttttttttcctttctgtacatgccttggtgaaataaggtcctaattaggacttggatcactgattgtttttcagatggtgaaaaggccgatatatctgccaatgtctatccagacataaacatcatcactggagcccttaaactgtatttcagagacttacccatccctgtcatcacatatgatacctattccaaatttatagatgcagcaagtaagtacttcaaattaattttttatttctaccaaatttttaagtacagtgcttttgaccttcagataattaaaactcagaactgtttaaattattgcatttgtgcctgtcttgtcaagtgagggcacaacaataaatagctgaccaggcatagttcaacagctgagctgaaccagttctaagaactctgtgggctgatgtatgtgtcaggcagttctgtccacattgttccttgtatgctgggaaccaacacagtcaggcctattatatgttgaaagcatgaatatttctgtagcagaaaaaaaagtcttcaatgaggactgactagatcatgggtatccaatcttttgtcttccctggaccacattggaagaagaatgattgtcttgggccacacataaaatatactaacattaatgatagctttaatgataattttaaataatttttaaaataaattattttaaaatcttataatgttttaaggtttacaaatttgtgctgggccatgttcaaagctgtcctgggcatgtgcggcccataggctgcgggttagacaagcttggtctagattaactacttttatctgttaggcagaatttcattcctagtcagttaaagtcacaagcaagttttgtctattgatgctgttcaaaatgaatagagggccagaatacactgtgtcaagcagtatactagaacgtctcaccagtttaattctctcatgtaccccatgtggcaaatattataatcccattttacaaagaagaaaagcaaggcttggagagctgagctcatgcgtccaggaatgggacatcaggatttgctttccatcagcccggggttgctcattcagtgtttggcacttgggcccactgctgagggagagaggaatagagtgaaaagggggcaggtctgggggaaggggctacactttgcccaggaagagtcaaaagtgaccaaaggtagattcagatgctgagacacatgacacggaagtcaagctcactttgaggaagtttttgcttgttgttgttgttgttgtttttatttaaaaaaaaaaaaaaaacctttaaaggttgaaaagtttaggcatgctgttaaatgtagtaatgagatgcctgatggggagacacaaaggcaggctgggatcagtgtgagatgcacttttcggatgagctgaggccctgaccccggtaagactattccctccttccggggccctagtggtcctggcaaagaaggttctagcatctagatatcctctactccaggaggaatagcaggagggttttctttgagtagctgccagtacctatcagagacccaaaagccagaagcatgtactcttcctcccattgttaatgtgtccagtctccacttcctaacctgggctgtgcaccggggttaagtatgccaacgccacggtgagaagtgccatgagtgcaggctgagttgggtggctcattgccaatgtccttgccttgtaaaatgtattaggttgtagaagtccgccagggaaagactcattagacaactgcaaggcaatactaccgtatgtggtgcagtttaaattaaaacttgtgagagggatatttctagcaaatctagtgttcagaagaaggcaaagcatagtctgcacatatgctccctgactgtaagcattctgctggtttacagattcatggagggcaaggacagtgtccagcctctggccacccagaggacattcaataagcatgtggtgctcagcctcaaactctttcctgaatgacacaggacaccaacaaattgattaagtgaaacagtgcttggattgcatgaatttattagaatccttccccacttctggctaaaacaaaaacttcttgttacttctctgaaaacttgaatgccacactctgaactaatacccatcatgcgtgaacttcacagaaatctccaatgcagatgagaggctggaagccgtccatgaagtgctgatgctgctgcctcctgcccactatgaaaccctccggtacctaatgatccacctcaaaaagtaagctcatgtctcgtgcacaaagcctgctctgctcctagagcggttaatgcatgaggaaaagtggacggcattcctccccagccataactgctggagtttcactgtgccaggaaccactccaggcactttcagtgtatcatccctatgaaaggggcgccactgtgatggctcacgcctgtaatcccagcactttgggaggccgaggtgggcggatcatgaggtcaggagattgagaccatcctggctaacacggtgaaaccctgtctctactaaaaatacaaaaaaattagccgggcgtggtggcagccgcctgtagtcccagccacttgggaggctgaggcaggagaatggtgtgaacccaggaggcagagctggcagtgagccgagatcgtgccactgcactccagcctgggcaacagagcgagactccatctcaaaaaaaaaaaaaaaagaaaaagaaaggggtgccattaggggccttgtgtcacttgtgagattgctgatgcctggggaggttacacagctgatttgaagaggtgaaggcaggatcccaggcaggctgatgtacagcctttaactactctgcctccgtgtctgcatcttcatctgacacaagccctgtactctgtgtcctgttcatccccctgttgcttgcccctttccaggctcctgagactgcctgcctcctgggagagcacattcccagcctggtctcttatttttctggatgtgtgagttctctctcattgagtaacaaattgctcccgaaacttagtggcttaaaactgtaaacatttattatctcatagtttctaagggtcaggaatccaggtgtgactcagctggctgcctccagttcaaggtctgtaatgaggctgcagtcttatctgaaggcttgatgggtctgtaatcccagctacttgggaggctgagacaggagaattgcttgaacccgggagacgaaggctgcagtgagcgaagatggcaccactgtactccatcctgggcaacagaatgagacgctgtctcaagaacaaaaaaattcactcctgaaggcttgatggtggtagcatccatctccaagcccactcacatggttgttggcaggattcagttccttaaaggctgttggactgaaggcctcactccctcaccagcagtttgctggaggcaaccctcagttccttgccatgtgcatttctccataggcagctcacaaaaagccaacaggcttctctcagaacaaaaaagcaagagcacccaatatgagagacagtctttttgtaagctaatctcagaagtgacatcctattgcttttaccgtgttttatctgttagaagcaaatcaagtccatcccatactttaggggaagggatgcagggtatgaattccaggaggcatggatcgctgaggtccatctcagagagtacctgccacacacacagctgtctgcgtgagtgtgtgggagacagagatggagacgtctggatgtttatgggacactagaacctctggtgacactattctccctaaaccttgtgtctctctctttcactgcacatgtgtaatgaggtcgatgaattggtgttataacattggagggatcagggcacatctgtgtgcctctgtgtttttgaaagatacttggcagcagcccattctttgataaaaataaaatgaaccgaaaattgtctacattgaccagtttacagatctacttagtatgtgaaaagaagcaaacggaggactgtataaacagtaggtattgagatttttatttttctaccttataagacatacaagaagacatacaatattgttgctcagattcagggtgatggtaacatttagctcagaatattcccattctgattaatttactgaatttaggagtgcaagtaatttttagataataaactatgggtatcacatctggctttcaattagctgtaaaatacttattgtgatcaatatccagttgttacagtttggaaggcaaagtaccactaccagaaaaatgctgacacctttcagctgaaccttaaatgccaataatactgtatctttatcatagtgggtttgccagccatcttgtttagtcaggcatagtgcctgacttaagaggaaactgtgggcactttgatggtgagaaacgtcctctttccaaccttcttcttaggctttgtggcatgtacatgacacaaactgggttgaccttaaaataatactcaatggctaatcctaatgagttataaggaaatagaaagggatggctttttatgcacaacctaaacacattttaattatattttcctaaacacattttaattatattttgctcatttttggagaacccattcccttttacatctattatgaacattctaaaacttaaagttgtgaaaacaaaactctgggagatagatagattgtaattttattccatgaggaaggtgttaaaccagctttgcagtttgaattttattcttaaaggctctgcagttcttacctggatgtcgaaatgatttttaatttcaactgctgtagacctcatcctgtgggaactagaaataatgtccaactgccgtccagtctggcgacattccagccgttcccccaccccacgataacggcctgactcttcctcaattcatgacagcccattctacacataacctttctcctctggcaccggtcctcccagcagagagggatcctgcccttcccttcccactctccagcatacagaccagcaggaagccacaagagggaaaaaaaaaacgccttctgtataaggcctatgaaaggaccatgggccagcctcagaatctgctgcccctacaaaccagtattcctcaaatgatagttccacatttacttaataaggaggactaattttctaattttaaaaattgtgttcctgccagattcacataagtaattcatttccaccggcgaaggcaatgtcaacaatttaaaacgaaaaatcagtaaattacccttccaaaaatacctttctgctgttctgattcccaatctttttcttgcaatttcctgaaccagagatgttatcgggacttacatacataatcaatacataaaatcaatcctcaagtctccataatgtctctgttctatatgtttgttttgcagggttactatgaatgaaaaagacaatttcatgaatgcagaaaatctggggatcgtgtttgggcccactctgatgaggccccctgaggacagcaccctgaccaccctgcatgatatgcggtaccaaaagctgattgtgcagattttaatagaaaacgaagacgttttattctaatccatcagggaaatgagctgaatggccccagcaccatccaagttgacacagctaaaggaataaaaacatttcttaccacttgatttgttttccaagcaagtgctagaatttcctggactgcagaggatcgctgagtggggtactgtgtctcatagacatgcgccacctccacgtgagaacaagggtgaaggtgagggaagcccctcaccttgggtcttttgctgtgcctcctatgtatgtctggtttgctggaagagtgattaatacatctttaatttattaaaaaacaatgtagacctttaaacttcagtcttattggtaataaaagggaacttaattcatacaggtacttgatacagttatacattttccacttacaaaaagaagacaattctgttaaatgaaacgtgtatcgtaaaatgtatttttattttacccacgagaatgttgttatttttagcaaatagaactcaatgcagtgcattggttattaccctgtgtaccttgtccctcattttgctgtgacaccctgaaaaagctgaccacaaatgcagtattatcttgacatacctctgtcctcctcagtgctttttaatgaaatttcacctgccccttgtgttcctgctttggatagtttttgctcttaagcattggcattcttctattgtatggtatgtatttatagcaattgtaggatggtctgaaatgtccacacactttctatgcatacaaattttgtgaattcccaaagtatgctttggaattggtcatagtcttttcgtatcatgagtgtgtatcccagaagatacagaatgcggtcattttacctgaaattatttgagaacactggatgtatctggtctgtgtaaaaagttagcacttaccctcttttcttcctggccaagccctctgaattcatctgttaatatcaaattgtatttttgccacatttctgtattggtgaaaagcgaatctgcagaataactgtcaacgtttttcattcttgttttacaaacctattttttaaagtgagaataaggttggtttttaccaaatatttgttcctccttgacaaaagtagctctgtgtggataatatgattttattactacagttccagtcacttggttatatttatcttagcatgagcctttcacaccaagatttctatattttgtaacataggtgaaatatttaaaacatcaaaaactgtaaatctagatttttaaaaaatccaactgcaatgtcttttcctttgattgagatgatttgtgtaaactcaccagtcttgctttggagtgagcagaagagaatgactattttacgtggagcatcattgtgtgactgttgacctggacagtcccaagggctatgcagatggactccattggcacagggaggtttgacctcttccctgctattatccctcctcccaactgtacagatttgtttgttgtagtttatgtacttcttgatactgtcaaaaaattatctggaaatggttttattttgtgaagtgaacaatactttgtaatttatgatagtgtaaatggaaggcaaagcatcacatgtattaaattcttctgtctatta

SEQ ID NO: 277 - DNA, 9876 bp, Homo sapiens
acagacgttcgcacacctgggtgccagcgccccagaggtcccgggacagcccgaggcgccgcgcccgccgccccgagctccccaagccttcgagagcggcgcacactcccggtctccactcgctcttccaacacccgctcgttttggcggcagctcgtgtcccagagaccgagttgccccagagaccgagacgccgccgctgcgaaggaccaatgagagccccgctgctaccgccggcgccggtggtgctgtcgctcttgatactcggctcaggtgaggattcaccggcgctgaactgctgggctctcctcccatggcaggttttgcctcttgagtttggctcttgcttctctaaaaatcgccctttagttcccccgaccctgcgccgcaggaggtgatcactgtagctccctccctaggaggaaaagagaagggcagatgtctcaaacgtccaggacaaggtgtcccagagaatcgctgtactttttctttagttcagctgagaagacgggagagatcatttgaacctaacccttcgtttcacagattaaaagattaaaaagaccaagatctagagaggtgaagtgatttccgcagatattggacccagcagtgtttgctgcctcctgcctaattctccatctctgtctagtgatttcttctttaccttcctagagggacttagagtatcccggcgagaggttaaaagcaccactctgatgctgttttattgagacctaagaaaaagcaagataaagcagtggcttaactctgggccccaaatcttacttagtactcagtttattgtctatgtagtaataataataatgataatgaaaaatgacaataataatcgatataattaaccactgtttatattattttaaaagattatcttttaaaaatatcttttaaaaatatgaacacatcttttaaaaatatgaacacatcttttaaaaatatcttttaaaaatatgaacacatctgaagaaaatctgatatttgtatctaaaacctaccgaaataggccaggatggcattctagcaaaaaaagaaatgcatttggaatgtgaagtgatgggaatttttagacattacccatcaagtaattgtattagattaatttgccaatttggcgggatttttttgatgtggaaattaatgtggattatctgtggaaaagaaaaacttcagaaaagcacttctgtaattgggacagctgaatttgcttgctggcaaaaatgtaaagtttctttcatagaaatgactcaatcacaaacaatagcacatgtgcaataactgctttgatgtcaaaagataaacttttctacctaacacagctgactcgaaaggcaccctactttaccttttcttttcttcctttattccctcccctgcaggccattatgctgctggattggacctcaatgacacctactctgggaagcgtgaaccattttctggggaccacagtgctgatggatttgaggttacctcaagaagtgagatgtcttcagggagtgagatttcccctgtgagtgaaatgccttctagtagtgaaccgtcctcgggagccgactatgactactcagaagagtatgataacgaaccacaaatacctggctatattgtcgatgattcagtcagaggtgagtaggggataaagcaaaaatatggcctgtgagatgtgggtttatatgagcaaagctgcttcagaagtaaagctgctccccagattttctagtggctttattgtatatctgttggatagcccctaggtaaactgtgacaaaaagaaccataatgtgggcacatcctatatggccagagtgatcataaatggtgtatgtctcatttttaaacctaatcttcacaatgactttaagtaggaattgttatcctcattttacagatgtgataactgaagccgaaaaaggttttgctctaggttctacaggtgacaagcagatgagctagaattagagctccagtctgtttgattctatgcagaagagacactaagctctttcccactatgctacatgacccccattctgagagacaaatttagacattaaccattcctatctactttgtatcttagcttttgtatccccttccccaacaccacccttccccagataactgcattttaacacaaataaggggacaaggaagtaatgggacaggaggcattagactttagcgtttaagtactaggtgatgagaagctgatggaataataataataatgccatctggaaatattaaagaagggtgaatatacttagattttgtattgctaaaatcactctttaaccccaaatcccatttgttagttatataacccatggtttctttcactttcctgttatctcatattttaaaaaggccctttgcttggagtgaaagtaccaaagtaagagagaaatattgcatactttggagtctgaaggaagaagaagttaacagtaaataagatctaaatatcctaagagcatccactacagaggcagggcaagatggtttcagagctgttgaaggccttttctgtcctgacttgagtttccctggcttctccccctcttgtctggttctcagaactggtgaagggacatcaagtggtaccagagggacagtgacttgggtgagtgggaagtgagaaaacctttagcgaacactccacttaattcccttccttctcaaagtgtgcttttctgtgaggtgggtaaggggttcatttgtgcttatttttgaaggcatgagattagacccatcaaggtgtctagaaactgttctcttaaacatgtttcaagttgttaacacttcagaaggccaagtaaatgattagtagtacaaatgatgactagtgctcaaaattgcaatgcattgtgaaatagagtgaaaatgttggctgaacaccttcgaaaggctaagttaaatgtccatgatgttagtgcttatcgcaacacttcagcatagtgacttttttatttgcctctgtctatagtttgtaatctatctgacaaagtgaagttacaacgttcattcaaaatatttctcttaaaggacttttctgtcttgtgcttttttatcgtcagagaaaagtttcaatataaaaatcgcataaccacctcttaaacatttgctactaattttacttttgttaaatgttattataataaactgctaaaatactcagtatttattttccatttccttaatcacagatattctatctttgataccctagttgaccttcactatgtttctaatgttttgtattgaatgggtgctgcatgaccattatgactaatggtattttctctttactgaaatctgtttgctaaatattcacttggataaacctcttcagacattagtgtaacaaaatgcacagcactaacatgcaaagccatttgctatctttagtatgtgggtaaactacaccttgcataactgcaagactgaacaaaagtttctgtggatcagataagataaatctctgaagcactgaatacaaatattcctgggctcctgttttcaaatagattgaccacgaaaatgagctccatggaaattatcaatttgattataatctgttgtaatctgggtgttggagcattgtaacatagagtaactctaatttataattctcagttttttccacctgcaagtagtactcactaattcccaactataatcatgagtggacactactttcaggtagaaaaaactgaaaattataaattagggttatgcagtcctctctaacttttatattgtgttaggtaatgaggcacgcatggctgttacccctgtgagcgctcactgctatgacatctttctctcatgtctctaaaattatattcaagtttgagagactcttgtcaataaatcttttcttttttagttgaacaggtagttaagcccccccaaaacaagacggaaagtgaaaatacttcagataaacccaaaagaaagaaaaagggaggcaaaaatggaaaaaatagaagaaacagaaagaagaaaaatccatgtaatgcagaatttcaaaatttctgcattcacggagaatgcaaatatatagagcacctggaagcagtaacatgcaagtaagttttcctaaagcatatagaattttgtatttctagcaccatgtctgaaacccctaactgcaggaaaccatttatttttccaatgtataaaccaagggtcagtaaactttttgttaaagcaccagatagtaaatattataggcttagtgggccaagattgttacatgtacttaaacaacgaattaaagtgtaaccatttaaaaatgtaaaattggtgggtgcagtggttcacacctgtattcccagcactttggggggccgaggtgggcagatcccttgagcccaagagtttgagaccagcctgggcaacatggggtgaaaccccatctctacaaaaaatacaaaaaagtttagctgagtacaatggtgacagcctgtagtcccagcagtctgggaggctgaggtagcagaattaattgcttgagctcaggaggttgagactgcagtgagccgtgatcgcaccactacactccagcctgggagacagagcgaggccctgtctcaaaacaaaacaaaacaaaaatgtaaaaactattcttagcttgcaggttgtttaacaaaacaaaaaagcagcaaatggctggatttgatccatgggctgtagtttcctgacccctggtataaaccattattttttgtgcatgctcctgcttgctctctctctctctctctctctctctctttctttctatatatatatgtatgtgtgtgtgtatgcattttttaaaaactcctttaaaaaaggacctaaaggtaatttttgcataatctttcacattgttttaacctcctccccgcttacctcccacaagcagctagcacattaaataatattggaatgtatcaactgcataacaaatcactgaactcatcagttggtcataaaagaaacacaaagaatgacaaggcgtgtcttcttgaactatcacacccaaactaatctcaacttgttcttatactaatagatccttagttagaatgcattctgtgtctcattatttaaaatacgagtatatggcataacttttttaatgttggaattaaatggttctttatgatctggagaataagcttaaaacacaccgcacgtttttgtgattataatttttaaatgtgaattgcttgcagatgtcagcaagaatatttcggtgaacggtgtggggaaaagtccatgaaaactcacagcatgattgacagtagtttatcaaaaattgcattagcagccatagctgcctttatgtctgctgtgatcctcacagctgttgctgttattacagtccagtaagtatgacataacttacaaattcttaataaaataatgggaggttaattttttcagtatttctctcatactctactctggtattttagatgaattattatattgtcacttgatctttggtttatatttttatattttattgacaaatatcacagaaagtggtcaatgtttatgacttgtggccaccattgaaatttaacatgtaaagcccttttatagaagatctagaaattttttgaacttaagtaattgaaggttttatttcatgttatttttctactcatggttactttagaatctcagaaaatatttatatctactgtgaaatcctatgcttcatcaagcctcaggagctaattaagacctgtttataggaggttcgtagtatcagacatactgctttgatactaaaaacgacaaagaactacaaatcatcagcagtaaagaatagatatgttttctgctcatattagaatgcaaaattctgagttaggaatattataacatggtactaatttacttagagcttatgcttattttgttactatcgaatatgagaactcaattattaaaaataaatttccatcataagacatggcatagcaagcaaggacaattctattactgtttcactccagcgtatcttccctgtgctcataataacagatcacacacttcacttcatggccagtaaatgttaggactagactgtcccaggtagtaggcactgatgggtgcatcaaaatggcattgtctgtcaaacagaagtcactgaataagggaagttgggggaggacatgaatggctctgtgatgactcatgtgctactagagcttgggaaaagcaagggactcattcttctaattttaggtcttggtaaataactttaacagctatccacttgtgtacatgatctaccacgactaccattcaggaaacaaggggttatcttctgccattgttgacaattattttaaatttagatgagatcatcataacatgacacataaaaattgtttcatcatgcatatcaagtttgatatgtagcttaaatttattttgcacacactagaatttgtcctggttttctagtacctcaaggcagatatgcaaaggtgtttaggagacatactctcagacaaaccattattattttaaaggatagaacaaaacaatcgctagttaaggaagatgttttgtaataattaaacttgtaattatttgacttgaaatatttaatcattttttgggaaagaatggatagattttgttaatgttagcactcttaaaattaagcagtggcttttttccccgtgtctcccatattctccttgtgtttgaaacataaaacaaacactaaacctaagcaaaagttgctgggtttgttttcataattgaggtgagtttttccctcaactattacaataaaagaaaactttttatgattttaatgataatgttttgtggtgggttaaagacctcctaacaacagggggtttttatacaacaacaagaagtttttaaataattgagtttttaaagtggaaagcagcagtaaattaaactagaaggatatattttatacctagaaataaataaagctcaacttgttttgtaagcctgtttcaaaaatatttaatcatttaatttgtgcaagtatagagttctcctatggcaaaactataccatcatcttctccaattgtgcatggcagctgtactaagttctgcaaaaacaagacatatggatgtgtttcataccttctcagaattggtatatcaagacacatttaaatataagccctctggaaatggatttatatacagtcaacataaatacccccttagaaattggtaatattttatagccaggtttaggtttagtgtcaagtatagtgattgctggtctatcactactcatgaagtggaaccccctctactcataaaaaccccaatcaaacatatagatgaatagaaccttgataacattagaatgccttgttctctgaaggcttagaagacaatacgtcaggaaatatgaaggagaagctgaggaacgaaagaaacttcgacaagagaatggaaatgtacatgctatagcataactgaagataaaattacaggtttgagttttaaaatatatctttagatcatatcctataattttgaaaaatttaacactatataatctcaagaaaaatatggaatgtgttcttaattatatatacactatgaacaatggctatgttaaagtattattctttgagtataagatggaattcaatgttgagaatagactacgtgtttaataagtattattagggatataaatataagagacactggtccagttctcaaagaagttattgtttagtagataggaaaaaaatgtaagaaaccagaatactagggatgtaaaataaatgtcatgagaaaggaaccaatggagtatgagaagtttccagtgaaaaacagaaagaatccagtagaatttatttagggaagaggaaaagatgtgttcggggtggccttggaagtgaacgttgaaggactagtgagattggttcaagaaactgtgaagggaaagaaagggttatactgagaaatggaagagataattttagaaacttgtgaaaaatggcttaatctaaatgagtgttaggggagatacagttgtgatgataggttgagctcacatggtggagagccacagttgcgggtgcttgcactgataatgtgagggcatggagacagacaataggttgaatgctctttttttacaaaaggaagtagaaagggagggggatgtaaatttgataaataggttggtgaaaacttatattttcttgtaaagagagagaactgagcatgttgtaggtataaggtaaaaaggcgtgaagaggaatatttcgttgataatgaaagtgagcagctagggaagaaaactcccagaggaagagggaggcaaggaaatcaagaacacacttaaagtttgtcagaagaaggaactttatttccttaaacattcaagaaagatgatgtcatttcagttattgattgtctaacttcagtaggtttaagagttacttgagggctgggcacagtggctcaggcctgtaatcccagcactttgggaggctgaggtgggcggatcacctgaggtcaggagtgcaagaccagcctggccaacatggtgaaaccttttctaaatatacaaaattttctaaaaatacaaaaaattagctgggtgtggtggtgaatgtctatagtcccagctacttgagaggctgaggcagtagaattgcttgaactgcaaggcagaggttgcagtaagccaagatcgcgccattgcactccaacctgggcaacaagagcgaaactccatcttaaaaaaaaaaaaaaaaaagaattacttgagatgcttgttgaatatgcatattcctaagcccagccctaaatctactgaatcagaattctatttttaatgtacactccagatggttctgatacttgaacaacgctatatttagcattggttaagtacagatattttgtttttagcctattgcagaattagctcaataattcataaaatgggtaattattcataccaatgctaaactcagtatttattacatcaaaatttttaatgtattggctaattttggtaaagctaagaccaccagtgtgaataaggatggatttttggttatttgccactgagattttttagcatagatcccagaattattttaggaaaaagaatatgctgtgctagcacatagtgggtgcctattaactggtagttactattattatgcccttggtactaattttcctaaattaactatatatcataaatatgctgagacagttaatctttgattttaattatgtccactgcatagatttggttaggaaaactatttctcatgactgctgttgcatttttattaagcagaatttgatgcaacagatttgagcatatgtggacttctactgaactaggtgtataatcaaagcaagtgtgaaagaggaactcaagccgaagtaagagttggtctctgaaaaatcttagcatttctcaaacgatgtactagaaaacaactgacagaaattctgattcctgattatgctttaaagtttcttaaagctctgctggaattgagcttatctgtaacattttgttttattttattattttattttattttattttctcacaggatatcacattggagtcactgccaagtcatagccataaatgatgagtcggtcctctttccagtggatcataagacaatggaccctttttgttatgatggttttaaactttcaattgtcactttttatgctatttctgtatataaaggtgcacgaaggtaaaaagtattttttcaagttgtaaataatttatttaatatttaatggaagtgtatttattttacagctcattaaacttttttaaccaaacaga

SEQ ID NO: 278 - DNA, 121526 bp, Homo sapiens
gctgctgctgctgctgcgcgctctgcgctgccgctgcggcggctgcggccgccgcggctgcggccgtggcaaagaaacaggctgcgggcggcaggaagggctgctggggctgcggctggggctgctggccggcgccgccgctctccatcttggcagagctttccatgcgcagcggcggccaaggagtcgcggaatcagagcgatccgggacgcgaggtgcggggcccgcgagggggacacagagagaacttgggtgcaggaacagagagggaaagaaaaggaaatatgaagcgggagccctgacggaagttaaaaaatatatacaaaatccccgggagacttcttagagtgggagcaaaaaaagtgaaaatgctttttctcctccctgcacgccgcctcctcctccctcccctcctcccttcgcgggttggcttcgggagcctcgcgtggcgctcgcgtgtgaggctgccgctggcgccttcttgtttctaagaaaaaaaaaagcagaagcagcagcaaaagtcagtgctgaacgcgctctgccgcgtctcgcgttcctctcctactaaggctgcgctctcttgcgccgggtctcggtctctccagccgtggctcaggctgtttttattattttgttaactcccttcctttctgatttccttctttcactcgccctccctggccggatccctgtcggtgcgccttccacgttccctggccagaagtgagagagtgctgggctgccggagtgcgtccgccttttcaatgggacacccagccccacgcgcagccctggccccgcctcgccccccactccccgctgctgcagcgagcggctgcagcccccactcccccccctcctcttacctcttcctcccacccactccctaaactccccctcctcctctcctctccccccctcccgttcctttctcccgctccttgcaaactctccattcagctgggtttgttgttgcagtgcgtgcgcctggcgcgtgccggactcccggctgaataaacaggcggcgcgctcggggcgggctgctgccgggggtggctttaggaagggggtggggggcgtcacaggagggacaaatggctctaggaattgaggtgtataggtggaaagacttggggtgaagctctcttggattctactaagaacttgaagcaaagcgcagggaagggtttgggcagaaaaaatggcacaggaacggtgtggaggtgaggagggagtggggctcgacttttcctgttttctctctctcctcactgttattctcttcgggttcctcggtgaccctagaaattggagcaaattacgattgaagtttagaaacatggttgggggagggactccgtccagaacagtgaaaaaaagtgctggactatgtgaaaacgtgggttctagtcccaaggcgtcctctcaatgctctgtggctcctcgaagtggcatcctctctgagccttcgcttcctcgtctgcagccacagaatatggtctctaatgtcccattcagctctaaaaactaggatgtgctccccataactgagcaagtgtgtggggggccgcggggaagcgacaccgaggagtggttgtgagccgtcctgtaggtgggtgtatatggcagggacgtccccctaggatgacctctggccccctgtaccatcgccccctaccgccaccccctccccataaagattatttccggaccagcttagcggatatcataaagaagggagtgctctgggatactcccagaccctcggagaagaaagatgcggggcgggggttgagtgatggcgcttagggcactggtggggattcctggttcttcggcgccgccgcgggcacctcggcggccttggcgcagccaccatcccgccccaggcgtgtgcccggcggcccggtggcaggcgactgggagcggagcccggcggggccgcgtgctggcgccgagagggagggggaggcgcttgcagccgtcgctcgaccgcttggacagcgcctgcccaggcgtccttcctgggccttcggccctggcgctctctggccagaaccccgtccagcttcaggacgtctggggacgcggcgctgcggagaaagcagaccaagcaataggccccatctctttaaggatctggtccggagagaggctggggcatgtctcaggtcttgtctacataggcagaacgaagtggagggcaatcatccatttgattttccagtagaaataatccgagatctgggtgcaggaatgattgtggtgaattatccggataattggttctaattgaactcccctttgtggaggtggatctttctaaagggccaaggggatgacccagggagctgctcttggtatgtgggctggctgagtgtttctggaacaatagtgatgatggtgggcagtaatgacgggcggctcccgaagtgaatcacctctcttctctacctcagtttcatctttgcagaataggtaggcttcagaggtataggaccaaatcgtgccaacagaggtcaattctgtaacctttcccagccacacagccccttctccccatggtaacctgtggcttgatggcctcacaggactggctgaaccccgtgggattcacacctcaggcctttctccacatccctgaccaaggaaagggcctaagaggtctctggaagtataggaggtgagcacccaaaagcagagtcacaacacagcctgggcaccctgcacctcccagccagagtaagcctcagaccacttgcagaaataggaattattcaggcactccttacccacctcccacatgacccagctgtgtcctaatgccccattcactctatttcagccaaatagttgagtgttgggggtgggagggagtgtcgcaaatgtggaagcatctagatgtgttttcttttacattaagctgaaacatgagccccaaactccctactaacttggactcacttcacaaaggtcccgagtctgagctctaccacaatggtgccttataaccttgaacaagtccctctgcctctactggcctcagttttctgatctacacacaagggatgtacagtagctaattttgaaacttgtatctaacagcttagaaaatttgctggtagccagcacgtgtttccttttccaggatgcatacacagagatctcaataccagggaagtagaggacagaacctcctctcctcctcccccctacacacaccatgaaatgggtgcccaaatggagtggaagtgcattgtagtgaagaagccttgtcttgtagtggccttactcattggcctcaggccaggaggaaggacagtcgttgctgggatccttctggccaaaaccgccagaacatttgtctctattctccctatgccagccctgagcctgacctcactcttctcaccctagtatgctaagttttcttccttacatgctttgcaaagccttccaagaaccgaggcgttctcctccccccactcaagtaaacctggagtttgcacctcaacactgtcatctccactttctcctccaaccctagggtagaacagtctataatttttctttagaggtttgcatttctatccttggggattctaccaagagagttttccattgatattggctttctggttgttttcaccagtgtgaagcaaaagatgggaggctcaggagccaaaattagaatcctgcctctgactgtgtgacctagattataatccctcctcccgacctgagagaactggccacatgttctgctctcctaggcccatggaattccagataaagcaggctgatttgacttggtatctaggcccctttacctgagagctgtgtgaccctgagacactctaggggtctctatttcacctatgccagtaattatagtatctacctccaagagttgtgagacttcaatgatatgtatgtagagcactctagcccaggtctaaagagaaagggattaataagaaagtcatgctcacacaacccacccaggaaagggtgtgtggcaggaggagcctcagcacttggcttcctggaaccactctgtgatcatcactccagccaatggagatccagtgccactctgtctcactgtcccagcacctaggggtgagtcattcctgtcatttttgagaaatggtggtgatactggcatattaagatgatggagatagtaacccgatttttagacatgaaaagtagcaagtaagatagactatagagatgttctgtggcctccacatgcaaggggcttcagcagagccactgggccctgctttcttggctcccttgccacacagtgggcctgattctgagcaagtccttagggctttagttggctaagacacttgaacaatgtcccatttatcttcacatgaagggagaagtaaacaactcacaaaaggaaggtttgataccttcattcataaatgaggtggtagtactccctttgcctgtatgtcaagggtgttatgagaattaaatcagatgttgttgggtaatttgctttgcaagtctctccacatatcagagattgccttttcactttttccgaatagcagcattcagtgttctgtcttgtcatgagggtgggggagtgggaaggacaaagcactgatcccctttggtgagtatcacccagagtacagacattgcagaaagataagaaggcttctctttctcctccaatacaataagggacttaatttctgcaccttcagacccctttcctatatcagaacactctggagctgaaccatacttcagattagactttatcttcattcagcatcaggatctgtagggggagatggctttcctagtggccaaaggggtctgctgccctgagatcagagaccctgtgccctgagtctcctgccaccttaatttccattcacagctgaaggccaggccagtaccacctttgctgaagctcaagacctatgtatgttctcttgattgtgtgttgtctctctgtaaaaagaagatatgactcatctctttgaaaaccaatttatgctttctctttggggagagggattgatattaaaagtgaaactaggattttcattggacaaataatttaataaagttatatttttaactttagttagattctgaatcaggggcaaagggaatacaaagatgaacacaagtcttggattctggattttgttacaggattttaagtgtaatcctcaatttgggggtgacttgagttccagaagcaatggatgctttgagaaaagtgagtgtgcttggcattcatagccaatattcatcttccaggagctataattaatacagggcctctgtcctgctggggtgtctgctgttctaaggctgtgctagacactgtcctacccagggaaaatgaaaaggactttactgcacaatctactgcctctaagaataccctacccaaggtaatttcagaaaggattgctgcccagcctgcattgactctgcaccagccttggagggcctgctcagggggcagaatagcacaaaccatgtatttggcttggctcagcttcctggtcacagcagccaggcttgcacctgcattaaggaattcagccttctaacaaatctattcactttttcaatatgctttaaaaagaaaaaagtttgaaaaaacaaaacaaaaaaagcacaaactatattttattgtggcttttgggataaggagggaatgtggggtggggtgaggaggtaatttgcagccaccctcacaagtccttttgaagttctccaaataaggagaagtaacgctaagtctttatttttttctaaagccccatttacattatgattaaataccttccttggatgagcataaagaaagtcgttaatctatatagctctccaaagaatcaatacattctaaacttttgtaggatttgttacactctattttgttacagtaggccagctcctctctgtctaggcacatggctttccttccctcctcctccccacctcctccaagaatgaaaataaagtaaaggtctttcatggtaaacaaaaccagctgattcttcacagagaacccctgaatagctggagaagaaaaaaaaaacttacaataaatggtgcatttttttctctgctgggtgtagtattcaaggatcagggcagtattcaaacagaggtccattttttgctcagcaagagagtttagaaaagaagcgtggagtccattcagagctctccccccttcacaatcgaagggctctatgaaacctatcttccatgccttgtcagagtgtttctggggaccaattagtgctttgttgtacggcttctttgctgaatctttgagccgcaagaaaaagcgctcttgagtctccccttattttgaccatttcagtcattactcagtgtaataattaatatgacaactggacgctggagtttgtatagaaacacctcagctacaggagcaagtgtgcagtgggtggtaacgagccgcacatcagccggagaagccacacacacaaaaaaagcaatgaatggcaagagagaaagagaaggaataaagataaaatagttggcacaacgcaggggaacataaaacagactcaaatgagaagaaggagggggaaggggggacaatttaaaggggagggggaaaaatgccctacagaggttaacttattttgaaactgttttctgaatagaaccgtggacgtgagtgaccggatttcagcccatcaaatctcccacccccactttgtggatcctcttggaactcgggggtggggaagagggctccagcaaactttaggttctccccagggttcttctggaaggtgtacccaacatgctactcagcccaattcccaaccctttgcaccaggtttggcttctgtttttatttttgcaaagtctgttcctcttggctccaacttccgtctttggagttgttaatggagaagttagggtgctatgtagattcaccaggcgagttcagtactactaccctggggatgaatgttggtgagaagccattccagatagacccccaacaactctgcttcgttgaccctcagaacagtaccctgtgggactcctgagccgtaaggagtctccctggtagcgcgcagcggggccaggctctgtgctccggcccccgtgcggtgcccagctctgcaggttcccgaaagtgcgccccggggtggggttgcaatccgccccgtgacggcataataaataattagagggtttaagcgtgttagccacagctcatgctaatgagccagataagggctcacgctaacccgaagtgacagtttgcatataggagggaagaagaaaaaatcctgcttccccccccacgcacaaacttgattgctccttctcaaattcatgtccccaaatcccttcccccattcctcggacttccctcttctcacatgcccccacttcagccacaacacacacactatccgtttttgacccttcctttgcctttcaccgggtcagacggcattgtgacgtcacaaaacccctgggtgcctatatctgacctgcgcggaaagttcattctgagtgcgtcctggcgagtctcagcccccaagcgggtggaacgcaccaagggtctcatccgcgaggaagggctttaacgctcagggtcaggaacctctgagagctcttggggacttgcgcgcccttggatgctcttgcgttcaacagggctaggagactaccggctggggcgaggaatgcaggcgcctagagccttggagctcctgaaacgttcctgccgcctccggaaagcaagggcagtttaccgaagtgactgaggtcagtcgtgtgtccccattgtgtggccacgtgtcctgtgtccatcaccaccttcccaaagtccaagctcagcccgactccttgcggtgcggcctgggaatgctctggcctataaatcagcttcgtggctggagctgtctccaccaccgtggcaaacctggacgctggccccgagggcaaagggaaagtgtactcctaacagattcaggaggaagcagccgcagcctgagcgcggcatctgccagggaaactgtgcgccccaggtcagctagttaactatttcatccctccccaccactcttccctaggccaagtatttgcagcacgggcagggaccagtaactgattttcaggccttttgagaggaagaggaagagagaggaagagaaggatttctaatagtagatattcactctcatggactctttaggaaacagcaacaaagacaagattaagtaagttgatatttttaaaatgctgacaacagtgcacatagtaaacactggatatgtgttaaataagtacaaacagacagaaatagataacaggaggtatatgctaatcatctaagatgttagaaaatactgttcagatctaaaaatgatcaaggctgacatgctcattgattcatcaaataactatgaaacctaatcagaggggaataagacacaatgagtgccttcaatacatttgtgacttagtagacattaaagcagatgtataagaaagtccattaaaacatgcggtgggggcaaccatggagaatcttcttccccatggtcccttctctttggactcccaccttcctgcatctcccaccccaaataaatacacaatctaggtaaaagtggtggacttgttatgcaaacacatcctaatgtcatccagcccctcttccccaaccagatggtcacccctaagcttctcctatataacaattcatgagcagacactaatgatttcaacatacacacaccctttgacacgttactgttaggtgcaatgaaaaggcaagtcacttaaagagacagatcccagaaaatcctgaaactttctacctctgtgacctctggcaagttgctcatcgtctctcaggctctataaaatgagagggttgagtaagatgcctcccctctgattctgactaaatagagaatacaggcgtggaccacatgatcctctagtggcaaccattcctctctttgaatagacgaacttggtttgctgttcttctcccactgccctcctgccataagaaccttcattaggcaaatgatgtcatcagtgagaccagtccttgctggtgccaggattatggctcttggtagccagaaggcaatgtcattgggtcagcatgactttagccctggggactagggcaagagatcggccattggcacctcaggatgcacatgcaaacggatgaaactcaccattgtcgccgacagcattgcttgggaaataggattctcctctactcctgggcagttttgggtctaggaattgggaccccgagaagctgtaatttctgcgagttgtgtgggtcgttcgccacctgccggttatttcgcaaactgcagctgggactgcgaacatttgcaacttgattcattcaggactacttgattctattccattaattcttctccatacaatttggttcaaccatagagcatcgtgaggacttaatgacgttctcccctgatactcccattagagataactgagatgtttgttaatattcagattctgaagctttatcccagacccaccaaatcagaatctggcaaattggctcttttagcaagctacctggaagtccttttgtatactaaagataaagaactatttctctagaggtattctgggtgataagacagtctccattactcagactcatgaagaactaatatattctgataaagaagttaaactagccatgtaaatatgttaatactttatttgggtaagaggatgccctagtgacttgagggggaggagaggctcagtaagttattacaaagatggcctttgatactggccctgaagaatggtcagaaacttgcagcgggaagaaaagatccacaggaacaacctacccagccccggagcctttcgcttccttgactttctccactccagtagccttaacctccattcctcttcagccaccccttgcaagtctgcatcttgggctttgtctttacccaaaagagccccactttggaaatcttaactttccattcccatatgtagcctcatcctctgattcttcctcatcctcacttctgccctacctctctccaacctcctttcctgagctctatttcttccaatctggtctccccccaactcaggaaagtttgattgattaactcataaacctgtaacttataaaatgcgtaccttcccatcctaaaaaaaaggctgatacactctctgaccttgtgaccaccttcagccctctgacaaattttttgaacattagtcaacacccacagtttcatttatttcttgctcttccctctggagtacccagagtgtgtctgtgggaatctttctggatgaggggggctgagtaaagattgtgggtagggctcatccaatctgttgagggactgaggatgagtgagggagaacttactctctctacctgtcttggagctggggcactagtcttctcctaactttggactcagactcatactggaactgtagtctgggtccacagtttgtcaactgcagatcttgggactcagcctccataaccacacgagctaatttcttgaaatacatgtccatctacatctaatttcttactggttcttttttctggagaacccagactaatacagtcaccccgactctattttgctacacataaaagataaatcaggtcctactttatttgatcatctcaatgcatctggccctgctgatcactcatctcttcttgagattctctcctcctttgactaccatggttcttatccttctgatcctttgtttctcagtacttagtttttttagtttctcatccccagtgtcaagttccttgatgacatatgctgcccttagagtttagcttccacctcttctgctgatgactctcaaattcttggttctggactgacctccctgggatctgaaactggtgtgaccaacattgctactggaatattccatggatgtatcaagggcaacatatttgaaactgagatcatgcttattccctcaactcgttccctccttttgtgttctatatttcagggtttagcaccatctgcccacacagtcaaaccaaaatcctggggtcatgccatactctcaccactctctcacaggcactccacaaccaccaagtcttaacaattatacacacacacagacacacacacacatatacacacacaaacacacacatttagtatgtatataatataaacaaatgtacataatgaaaaatccatctgaatttaaatcattttcttcctccctattactatatcattgctttacttcagtattgtcccagctggtattcatgcttttagtttaatctccctcaaatactttttcttcactgccaccagaatgatctaactaaatgtcacagtcacacgtataaaaggcatcagaacataaaaaaatggaactttatattacagccccagacaaagagatctttacaaagtatcacataccctattgctcctctacaaaacctttcagaacaggggaacaggatggctgaatagaagccttcacctatcattctccccacaggaacaccaaattgtgtgactatccacacaaaaaagcatcttcataagaaccaaaaatcaggtaagccatcacagtacgctattttagttttatatcactgaaagggacacctaagaaggtagaaaagacagtcttgaattgctgatgcaactcctcccccatcaccccaacactccagcagcagtggacgcatggcatggacagagaatctgtgtgcttcggtaagggacagcaaagggattgtgggacttggcattgtcctgccctgccatagtggaaagcaacaccaggcagaactcagtcagcacccacagagggagcatttagaccaggcctagccagaggagaactgcccatcctagtgttcaaaagtttagttcttgcaagtctcaccaacatgggctaaacagctcttgggtactaaagaaactcaaaaggcagtctaggccacaaagactgcaattcccaggcaagtcctgacgctatgctgggctcagagccagtggacttgcggggcacatgacctagtgaatccccagcaagggttgccaagggagtgcttgtctcacccctcttccaacctctggcagcacagctcacagctccaggagagactccttccctctgtttgaggaaaggagagggaggaataaagagggctttgtcttgcaacttgaatatcagctcagctacagtagaatagggtgctgggcagagtcctgaggtccctattccaggctctagcttccagacaacatttctagacacatcctgggacagaagagaccccactaccttgaagtgaaggacccagtcatggaaagaacctttgggccctgaatgatcagcaacagtaaccaggtagtatattccatgggccttggcttcaggtgtgacccagcatattcctagctgtggtggctatgaggagagactccttctgcttgagaaacagagggggaagaataaaggggacttagtcttggagcttgggtatgaggttggccgcagtggggtaaaatagcaggcaggctcttgggttcccaattccaggccttggctcttggatggcatttctggactgccctgggccagagggggcccactcctctgaagagagagtcccagaccttgcagcattcacaacaagctgcccgaagagcccctagcccttgagtgaagatcagtgatagcctggcagtactccctgtgggtctggggcagtggtagccagggtgagagacccctctgtttgtggaaaggggagggaagaatgggaagaactctgtcttgtggcttgggtgccagctcagccacagtaaaagagagcaccaggtagtttcctaaggtttccaactccaggctctggcacctggatgttgaagagttaggtgtttaataccctacttgcagtatgggcttccatctctggaccagcctaaggctggggagaatgtgtcaccctggctggctttgccacctactgattgtagagccctagggccttgagtgaacataggcagtagccaggcagtagttgccacaggtcttgggctacatccagtgctgtgctggcttcagatctgacccagtgaagtcctagtggtggtgaccacaggggtgcttgtgtcactgctctgctcccccagctccagacagctcagcacagagtgagagactctattcatctgggaggaagtaaggattaaaaacaagagtctctgcctggtaatccagataattcttctggaccttatccaacaccaccaaggtggtacctctgtaagcttgcaagagccacagtattacttggtttggagtttcccctgttgcaaatgcagccgcagtgatcaaaaacttggattacaatatccaaatttattagaatacctggaaatcctttccaaaaagtactactacaaacaagcccagatggtgagaactatataaaacactaactcttcaatgcccagacaccaatgaactagatggtcaagtatcaagatcatctagaaaaacacgacctcaccaaatgaactaaataagacaccaggaaccaatgctgcagagacagagatatgtgacctttcagacagggaattcagaatacctgctttgaggaaaatcaacataattcaagataacatagagaaggaattcagaattctattggatgaatttatcaaaatttaaaacaattaaaaagaattgagcagaaattctgaagctgaaaagtgcaatagacatactgaagaatgtattacagtcataagataattgacgaagcagaagaaagaattagtgagcttgaagacaggctatttgaaaatacacaaaggagacagaagagtaaaaaagaatgaagcatgcctacaagatctagaaaataaccttaaaagagcagacctaagagttgttgaccttaaagagaaggtagagagagagatgggggtagaaagtttttcaaaggcataataacagaacttgctgaacctaaagaacaatatcaatgttcaagtacaagaagattatagaacattaagcagatttaacccaaataggactacctgaagacatttaataatcaaaaaaggtcaaggataaaggaaggaggctaaaagcagcaagagaaaagaaacaaaaaacgtgcaacggatctccaatacatctgacagtagacgtttcagtggaaaccttataggcatggaggaagtagcatgacatatttaaagtgctgaagggaaaaaactattttttctttccaacttttattttaggttcagggactatacctacaggtttgttacatgggtgaattttatatcacaggggtttggtgtaccgattattttgtcacccatgtagggaacatagtatctgataggtaatttttcaatcctcacccttctcccaccctccaacctcaagaaggactcagtatctattgttctgttttttgtgtctatcttcactcagtgtttatttggttttctattcttgcatgaattcacttaggataatggcctccagctctatccatgttgctgcaaatgacatgatttcattcatttttatgatataatattccatggtgtatatgtcgtacattttccttatccagtctaccattgatgggcatctagtttgattacatgtctttgctattgctaataatgctgcagcaaacttgtccacgtgggtatctttatggtagaatgatttatattcctttgggtatataatataatgctgggtcgaatggtagttctgttttaagtcctttgagagatctccaaacagctttccacagtggctaaactaatttactttcccaccagcagtgtatgaacatatccttttctccacaacctcaccaacatctgctacatttttattttttcatgatcgccattctgattagtgtgagatggtatctcattgtggttttgatttgcatttctctaatgattagtgatgttgagcattttttcatatgcttgttgggtgtgtgtatgtcttctcttgagaagtgtctgttcatgtcctttgctcatttttaatgtggttgtttgtgttttgtttattagtttaagttcctcacagaatctgaatattagacctttgttggatgcgtagtttgcaaatattttctcccattttgtgggtcttcttttttctctattgatactttattttgctgtgctgaagctctttagtttaattaagtcccacttgtcaatttttctttttgttaacaattgcttttggtgttttcttcatgaaatttttgtagcgctgatgtccagaatggtatttcataggttttcttctagggttcttaaagttagttttaggtttttaaagttttaggtcttttaatcatcttgagttgacttttgtatatggtgaaaggaaggagtacagtttcaatcttcagcatatggctagtcctctatcccagcaccatttattgagtaggtattcccttcccaattgcttatgattgtcagctttgttgaaaatcaggtaattatagatgtgcaactttatttctgaattctctaacctgttccattggtctatgtgtctgtttttgtaacagtaccatgctgttttggttactttagccttgtggtatggtttgaagttgggtagtgtgatgcctctgactttgttctttttgcttaggattgttttgaatacctaggttcttttttggtttcatatgaattttagaatggtatcttcttattctgtgaaaaaaaatgtcattggtagtttcatagaaatagcaatgaatctgttgtgggtagtatggccattttaccaatgttaattcttcctacccatgagcatggaatgtttttccatttgcttgtgttgtgtctgatttctttcagcagtgttttgtaattctcattgtagagatctttcacctccctggttagctgtatgcccaggtattttattatttttgtggctattgtgaatgtgattgtgttcttaatttgactcccagcttggatgttattgtgtacagaaatgctactaatttttatacattgatttttttattctgaaacttttatgaagttgtttatcagatctagacgccttagagcagacacaatggggttttcttggtataggatcataacatctatgaagagagatagtttgacttcctctcctatttggatgtcttttatttctttctcttgcctgattactctggctaggacttctagtacgatgttgaataggagtggtgagagtaggcatccttgtcttgttccagttctcaagcttccagtttttgctattcagtataatgttggctgtggattcatcatagatggctcttattattttgaggtgtgttcctttgatgcctagtttgttgagggtttttaacatgaagggatgttgagttttatcaaaagccttttctgcatctattgagaagatcatgtggtttttgtttttagttctgtttttgtgataaatcacatttattgattttcctatgttgaatcaacattgcatcccaggaatatagtctacttgatcactgtggatttgctttgcgatagtttcctgctatttttgtgtggttttctaagtctttttgtagacctctaagaatttatgaatctgggtgttccagtgtggggtgcatatatagttaggatagttaagccttctggttgaattgaactctgtattattatgtgatcctctacttcattattttttatcattgttggtttaaagtctgttttgcctgaagtaacaatatctatccctgctcttttttgttttccatttgcttgatagatctttctcgatctttttacttttagcctatggatgtcattcatgtcagatggttctcttgaagacagcatatagtttggtcttgcttctgtatccagcttgctactctgtgtcttttaattggagggatttagcctacttacatgctagtttaatatggaaatgttcagatttgatcctattattgtgttattagctggttgttacataaattgtgtagttgctttacagtgtcagtggtctatgtacttattgttgtggccagtaatggttttttgtttccatgtttagcactccttaaagatctattgtaaggcaggtttgttggtaatgaattccattagcatttgcttgtctgaaaagagttttatttctcctttacttttgaagtttagttggtctggatataaaattcttggttggaatttattttctttaggaatgctgaatatagatccccaatctcttctggtttgtagggcttctgctgaaaggtcagctgttatcctgatagggtttcctttgcaaatgacctgccctttctctgtagctgtctttaatatatattttttccacactgaccttcgagattctgatgactatgtgtcttggggatggtcatcttttatagtatatcagaggttctctgaattttctgaatatgaacatcgacctctctaacaagattgggaaaatttttgtggacgatattttcaaatatctttcccaagttgcttgctctctcttcctgtctttcagggatgccagtgactcataagttaggtctgtttacataatcccacatttctcagaggttttgcttattttaaaaattttgtttttccttatttttgtcgcactgaactaattcaaagaaccagtctttgagctctgaataatttcctcagctcagttgattctgctgttaatattgtgttatgaaattcttgtagtgagtcattcagctctattagatcagtttggttctttcttaaaatggaaattttgtctttcatctcttgaatcattttactgaattccttagattctttggattgggtttcagctttctcctgaatctctatgatattcattgccatctagattctgaattttatgtctgtcatttcagtcatttcattctccttaagaagcatcactggaaagctaatgtggtcttttggagatgagaagctttggcttttagaattgtcagagttgtcatgctggttctttctcatctgtgtgggatgatgttctttaactgtggtgtcatttgagcagtcaattggcttcatttctagatgttttcagagggccagtctttgtgcagggtctgtctttgtggctgaattcttgctcatggtttcacagtgggatgtattagcaaagtatttttgctattgtagtttcagctgcagttcagtagatggcacttaaacataagggccattagataggttctcactcagttgcatggctcctctgtatttcctcctgcttgcctccatcctctcagtgctctgacagtgtaggctcctctcccagtcaagtgctggccacagatcttggcttggcactcccaggctgcacactgcagccctggggcaagcttgggcttttgtttcctccctagcttaaggtctgcaggggcagagaccttggcagtggcaatggcataaggcctgtcgcttgtacctgggagctccaccccagagaaaagcataagcactgccaattggaatcatcacctacgggtggggtggctgctctgtagtcccaaactgggggccctgcatggttaagaagagcagggagtcagggtctcacagtgaagaaagactgggctcctgtctgtatggaagctgcatgatgaagctctgagcaaaatgaacagggtctttgttcactccccagcccaagagcagcaagggcaggtaccatggcagtggtagtgccagaggggttgtcagttgcttctgggagctctgccctggagaaacacagaggtgctgccaatgggaacgtttagctgaaggtgggacagctgtgttgcaggcctaagccagtgggccctgcctggtgaagaaaaaggtgtgtagagggctctgggggaagacagtctggcctcttttccataggtcttctgtagtgtgctggaaatgtgagtaaagcactcaggctctttgttgttcctttctcagccagaaggtagcagtggcaatggcagagaggctgtcagttgcttgggggaactctacttgagagagacacggggctgtcagtggaaatgttcagctggaggtgggatagttactctgcaggcccaagtgggggtttctgcctgatgaagagcagggtgtcaggagctcacagggaagagagactgggctcctctctgtatggtggctgaggcatgttggatatgtgagcaaagcaatcagggtctttgtgcgttccccaacccaagagcagaaagagttgatatgctgccgtggcaatggcagagagcccgttagttgtttctaggtattccacctcacagaaatgcacagccaccaccaactgaagtgagaaggtggctgtggtgggagcccaggttgggaggccctgctgagtgcagtgtagcaggggcaaggaccagtgtcaagaataatctggctccttttctgtatggcatctactacagcatgttggaggcttgagacagtatttgggctcttcactacctccctagcctgagggaagtagaggtgagggccaagacagcagacagcaagcagcagcaactaagggtctgtcatttacctctgggagttctgtcccagagaaatgcagagctgctactggcccaaatgcttaggtgggagtagggtggctgttctggggtcctgggccagtgggctttgcctgaagatatgaagcagaggtgaggcttgcagtctgtcccttcctcagcactgtggacacaaaccctatcctgggggttagcaagagagcctggcattccttattggtgaaatacacacttacagcaggtggtgtcggggtgctcagggatccaagacccttggggatccatgtgagcctgagtggtagctctgcccggactctaggcagttgtccatgtcagtttggaggcctgggagtggggcgttgtggggagggtcacagggaaaatcctgtgcccagaattgcaaagatctatgggaatagtgtggtcactggggcctcttgctcacgcaccctttccccatggtggggatactcccttgcttccatgccaatccttggtgggcagctgtcctgcctcattcctctctgctctctgtggttcactgttgcttccttgctgaattccaacatggcttcctggacaatcttgtcgaagagcagtactaaggaaaatttatagtgtttactcacaactttatctccattccatgagagcggtgcacagtagctgcttcggtcagccatcttggcacctaccctctggaaaaaaatgtttatcctagagtagtatatccagccaaaaagttcttcaaacatgaaggagaaataaagactttcccagacaaacaaaacctgagggattttatcaacaccaaacttatcctacatgaaatgctaaagggagttttttaatctgaaagaaaatgatgttaatgagcattaagaaataatctgaaggtgaaaaacttactggtaatactaagcacagagaaaaatgtaatataataacattgtaaatatagtgtataaattactcatatcttgagtagaatgacgaaaagatgagtaaataaaaaataataactacaacaacaacttgtcaatacattgaaagtacaataatatataaatagaaataataaaaagttaacaatcagggcaacaaagttaaagtgtagagttttaaaattagttttctctttgcttgtttgtttatgcaatcagcgttaagttgtcatcggattaaattaataggttataagatattatgtggaagcctcattggtaccctcaaataaaaaaccatataacaggtacaaaaaaaagtaaaaagcaagaaattataacataccaccatagaaaactgctttcactaaaagaaagacagaaaggagggaaagaagaaaaagaccacaaaacaaccagaaaaataagcaacagaaatggcaggagtaagtccttacttaataatagcattgaatataaatggactaaactctcagtattagttctttctcacactgcttataaagacaagcttgagactgagtaatttacaaaggaaagagatttaattgactcacagttctgcagggctggggaggccttgggaaacttacaataatgaaggataagcaaacacatccttcttcacatggtggcagcaagaaggagtgccaagcaagagggggaaaagccccttataaaatcatcagatctcctgagaactcactctatcacgagaacagcttgagggtaactgcccccataattaaattacctcccagcaggtccctcccactacatgtggggattatgagaactacaattcaagatgagatttgagtggggactcagccaaaccatatcactctccaatcaaaagacataggctgtctaaatggaaagaaaaaataagtctcaatgatctgttgcctacaagaaacacacttcacctataaagacacacaaagactaaaaataaagaaatagaaaaacatacttcatgccaatggaaaccgaaaaagagaaggagtagctacatttagacaaaatatatttccagatagaaactatttaaagcgacaaagaagatcattatataatgataaagtggtaaattcatcaagacaatataataattgtaaatatatatgcatccaatgatggagtacccagatatacaaagcaaatattattagagctaaagaaagaggtagattcccatacaataatagctagagacatcaacacctcactttcagcattgagcagaacactgagacagaaaattaacaaagaaatatcaatgtaatctgcactatagaccaaatgaatctaatagatatttacagaacatttcattcaatggctgcagaatatacattattctccacagctcatggatcattctcaagaatagaccatattttaggtcacaaaagagtctttaaaaagttcaaaaattgagattatattaagtatcttctctgactataatggaagaaaactagaaatcaataacaggaggaattttggaaactacacaaacacatggaaattaaacaatacgttcctgaatgaccagtgggtcaatgaataaattaaaatagaaattgaaaaatttgctgaaaccagtgataatggaaacacaacaaagcaaaacctttgggttacagtgaaagtagtactaaaagaaaattttatacctataagtatccacatcaaaaaattaaaaaaattcaaataaacaagctatcaatgcatcttaaggaactagaaaaacaagagcaaacaaaacccaaaattaatagaagaaaaaaaaataaagatcagagcagaaagaaataaaacaaagaaaacaatacaacagatcaacataacaaaaagttggttttttgaaaaggtaaacaaaatcagcaaacctttagccagactaagaaaaaaaagggagaagaccgaattaaataaaatctgatatgaaaaaggagacattacaacaaataccacaggaatttagaggatcattagaggctacaatgagcaactgtacaccactaaattggaaaacctagaagaaatggatacattcctagatacataaaacctaccaatattgaaccatgaagaaatccaaaacctgaacagaccaataacaagtaacaagacctaagccataatgaagtcttccagcaaaaaaaggcctggtacccaatggcttcattgctaaatttcaccaaacatttaaagaagagataataccaatactactcaaactattctgacaaatagaagtgaagggagtactttcaaactcattctacaaggccattattaccctgataccaaaaccagataaaaacacatgaataaaggaaactacaggccagtattcctaaagaacattgatgcaaaaatccttgacaaaatactagcaaaagaaattcaatatcacgtttaaaagatcattcatcaagaccacgtgagatttatcccaggatacaaggatggttcaacatttacatatcaatcaaagtgatacatcatatcaacagaatgaaggacaaaaaccatatgatcatttcaactgatgctgaaaaagcattggataaaattcaacatcccttcatgataaaaactctcaaaaaactgggtatagaaggaacatacctcaacacaataaaagccatatatgacagacccacagctagggtcatgctgaatggggaaagactgaaagcctttcttcaaaggtctggaaaataacaaggatgcctactttaaccactgaagttctagttagagcaatcagacaagagaaagaaataaaaggcatccaatttggaaaggagaaagtcaaattatctttatttgtagatgacatgatcttatatttggaaaaacctaaatacttaaccaaataacagaactggctaaacaaattcagtgaagtttcaggatataaaattaacatagaaaatcagtagcatttctatatgccagcagcaaacaatctgaaaaagaaatgaagaacataatcccatttacaatatccacaaataaaataaaatacctaggagttaacctaagaagtgaaaggtctctacaatgaaaactataagacattgatgaaagaaattgaagaggatgcaaaaaccatagaaagatattccatattcatagattggaaaaaataatattgttaaaacgtacatactacccaaagcaacatacagattcaatgcaatccctatcaaaatatcaatgacattcttcacagaaacagaaaaaaaatcctaaaatttaaggtaccatgaaacacccagaatatccaaagctattctgatcaaaaagaacaaaactggaggaattgcattacctggcttcaaattataatacagagctatagtaaccaaaacaggatagtactggcataaacacagacacacagagcaatggaagagaataaagaacacacaaacaaatccatacatctacagtgaactcgtttttaaccaaggtgccaagaacatacacttgggaaaggacagtctcttcaatcaatgatgctgggaaaactggaaactcatatgcagaggaatgaaccaacattcctatgtctcatcatattaaaaaatcaaatcaaaatttaagacctaaaactatgaaaatactgaaagaaaacattggggaaactcttcagaacattgaactgggcaaagatctcttgagtaatatcacaagcacagtcaaccaaagcaaaaaatgaacaaacgggatcacatcaagttaaaaatgcttttgcaccacaaaagaaacaacaaagtgaagagacaacccacagaatgggagaaaatatttgcaaactctacatccgacaaccagttaataactgaaattacaaagaggtcaaacaattgtatgggaaaaattctaataatccaattgaaaaatgggcaaaaaaatctgaataagcattgtgaaaagaaaacatataaatggaaaacaggcatatgaaaacgtgcttgatatcattgatcatcggagaaatgctaatcaaaactgcaatgaaatatcatctcaccccagttaaaatggcttataatccaaaatacaggcaaaggaactcttgtatgctgttggtgagaatgtaaattagtacaaccactatggagaacagtttggaggttcctcaaaaattgaaaatagagctacaatatgatctagtaatcccactgctgggtatataccccaaataaaggaaattagaatgttgaagagaaatctgcatgcccatgtttattgcagcactattcacaataggcaaaatttgcaagcaacctatgcctattaacaaatgaatagatatgcaaaatgtggtacttatacacaatggagtactattcagccataaaaagaataagatcctgttgtttgaaaaaacatggatggaactggaggtcattatgttaaacgaaataagccaggaacagaaagacaaactttccatgttctcacttatttatggaggctaaaaattaaaaagattgaatttttggagacagagagaagaacaatgggtaccagaggctgagaaggatagtgtggtggtgaaagcgtggatggttaatggtacaaaaatatagtgatatagaatgaaaaacgtctagtatttgacagcacaacagagtgactatagtcaatgataatttcttgtacattttaaaatgaaagagcataattggattgtttgtaacacaaagaaagaataaatgcttgaggtacaggataccctattttccatgagtataagcgtgcaatgtgtaatgtgaccattaagcattgcatgcttgtatcaaaatatcttatgtactccataaatatacacctactacatactcacaacaactaaaaattaaaaattaaaataatgaaaaacctttcagtagcctcccattattcttataagaacccactgcctttgaagttcccgtaagagtgaaaaacctgctttgcctcctttcatgaactcagcactcactgtggtgtctcaaaaaaggcagatgttctatatacacctgttgaagaagtgaattgagttggtggtaccaaagctgcttacaaaatgtaagatatatgtatatgtaatacaggaagtggcatgcaaaacacttaatttaatagtctcagaaaaactgtccttctcctcttgtcatctctgtagcctcatttattccttggcatgggctctctaggatcaccagcgatctttttatgtgaatatcttcctagcctcaagcaactgggtcttctctccaaggagcccacagagtttggtgcttatttattgaatagcaggcatttaataaatgttcattgtagttgatattgatggtttcacataatcatggttgttaacttgtcaaagtcttgtgccatttccttctcataagctgtaagtataagaagggcacagtgggaagagcagaggccctgtaatggtgggtcctagggtttgggatggttgggcagggtaggcttggctttgggaagccttgaatgacagacaaatggtttggttgggatggcctgggagatttgtaagcagagaggtaacacagatgataagtctgaaggaatggaagggggattggaggagacagactctgacgacctcaaacccctttcctaacatcactttttctgagcttgttcagcacacacaccgccattcatttattctttcaacagacactagaatgtaagccccaggatggcaggggctgtgtctgcttcatttaccagtggttttttggtgtctagtacaggggctgccacatgataggagctcaataaatattactgcatcaacgtttattggatacctactatgtaccaacaaagtggtgggttctaggatgcaaaaattgaaaaaagactcagtctctgtattgagggagttaacataatattccttttcgcaagagggcaaggaaaaaggctgaatgcaaaaccagaatgtcaacagggtgctaacggagaccaatggaaggggcaactgactctccccagggaaggtaggcaaggagattgagggaagtagcaatgaaaggagagcttgcaaaatgaagtcatcagagctttgcataagaaacaattcatggaccttagatcaagtagtgaggattaaaactatgtctatgtgaggctttggctagtttttctacctaagacatccttacctctcctttccacttgggaatcatcttcctttcctaaccatcatcatcaaccctcaaggcagtcaggggcatctgtggcgcattcccccagcacttggccccacacagccaagctctaacacctacccaccccactgctatttccctctcataagctttaagttgtgggggagcaggttattttgtctgactcacatagttcctgtgtgggggtacctacaaattttggaagcctgtggcttataaaactttggggctctatttaaggaaaggaatacaaaattttaaatataaaatttgatagaaaaatgaatatgtctttagaacaaaaacccaagtaaatgccaccttattgaaggctggcaaaatgccacaaattccaggtaaattatataatatttttattaataaattatctaatcaaccgctatagtaactgtttctgtatttttggtgtacactgattatctcataatttttactttcattatcttcagagagaataaacagataatttattttttctataacatgattgaaatttgtttttttattattgataccatagatacgtaagacatattgcttcacacacaaatatactgaaatgtgtagttgtagaaccactaaagatttgtgccttacaaacaggaattctcatacattgatttcacacaattctccacagaaatggggaagaaaggatgtgtgtttttgctttattatcaagtatattcctgacaaggagagaaattctgttttgatcagggattagagagaactagaccccatataacatgctctccaaacttcttctcaagaccttaagacctagtaactcaggagagtggacagcaggggtgttctggaatctcttcttacacctagacagccagcaaaacaactcttataaaagtcagtgcaaaagatgtcaatataaccactaactatacacaaatgaattttcatcctatcttgttcttatctggatctcaaaggtgtctgtggccactggccatgaggagaagcatgatggagaggatgttaatgtgggaagagatggcagtcatacctaactgtggattaactatcttactttggcaaattaaaaaaaaaaagatgaaaatatgtaaccagacaaactcatttctagagttcctctaagagcctcagagcttatgtagatgtgaggctctaaagctttagttcattagctacatgatgaatctgcctctgctgtctctgagtaggtggtaaacacatactgaatgaatgaatggcagaaataaaataaaaagagcattgaacttggactcagatagcctgtgtgactttgagcaagttacttaactactcagtttattttctcatttttaaaatggggttagcaatctataccttacagataatgtatttgaaaatactctgtaaatcaaaatgtaaaatacaaatagaaaaatagtttttagaaagataacacataatagaagttccctaacttaatatctcaatgagtcccagttccagagatatcttctcaatgattagactgaagagcacaactcaatagatctctttgttccttcaaaagcagagatggagctatctctgagaatggcattctctccatctacttagcagcctaagagtcatctttgacctgtttctcatgctggctcatatctaaactgactcctctttttaaaatttctaaatttttctcaaattcatcctattttcttcatctccaccctcagtaccactttagtccaaggcatcatggccatttctcacctggacaagtgcaatcacctattagctgctttcgataccctccattccactctccaccttgcagccagagtggtcttgtcaaaacgcacatctaatggagccacctctgattacacacttcaagggcactccacctctcaggataaagataaaagttccttgccatggttgacatggtctaccccaaggagctttccactcgcatcttcaaccaagttccccattgtttctgcaatatgacctttgctcatgctattccttctgcctggaaggttctggaaggttccaggttcttcccttcccttttcatctagatatttctactttgctctctgagattgcaaaaacttcctagggaaaagttctcacagcattatgtacatctccttcatgacacttgttaagattacaaatttgaatttattcctgtgatttgactaatgtctgtattagtctattctcatgctgctaataaagacatacccaagaccgggtaattaataaaggaaagaggtttaattgacccaccattctgcagggctgaggaggcctcaggaaactgacaatcatggtggaaggggaagcaaacacatcctttttcacatggtggcaggaaggaaaagtgccgagcaaaagagaaaaaagccttttataaaaccatcagatatcctgaaaactcatttattaccatgagaacagcagcatgggggcatgagaacgccccaatttgggtggtggcacagccaaaccatataaatctccatttgctaaaagaaacataaactcaggaaggcagttataatcatagaacctagaaaagtggctctcttgcagcaaaagctgaacaaatatttttagattgggtgggtggatctcatgtctagtcccccaagtgtctccttagccctagacctcagccacctttttccctggtgagacagacacagaggaattagcaaaagaatttatatccacaatcaggtctgtgtcttatcaggaaactgagcaccccatggcctgatggactgtgtacctcagaatatgtgcctccaaaattttttattagatgagtagtgactgcagtctccaaaactcatgctttcaaatggtcaaacctaccaagtccctgcaagggtcaggggtctctaagtggataggggtgtttagaccacgccccttccactaaacattttgcttcccttgagaaccagagggaaaagataatggggactttctccagccctgacatcaccatacctgatattttgctttctatcccagaagactacaatatctcagacttctcatccacacaatgagaatactaaaaacctatcagtcaacagtaatttattgtacatttaaaaataactaaaagtataattggattgtttgtaacacaaagaaaggataaatgcttgaggtgacagataccccatttaccctgatgtgattatgactcattgtatgattgtatcaaaatatctcatgtaccccacaaatatatacaactactatgtacccacatatattaaacattaaaaaattttaaaataaaagcgtatctcattggactgtagaaagtatcaagtgagataacctttccgatgtgcctggtactgaataactaagtgctgaattaatttttgtttctctctctttccagaaggaatgaaatagaaagaataaagctgaaggacatttcatttatgttcaactagaaatccaatatagttttaggcaaactatattttcccttgcaactgtactcccttacatacatgtaagtgggaaagaataaatgtgacaaacaaaatatcactcctgattccacaatctaaacaaaacactgcctctttctaggttttgttttttggtttttgtttgtttgttttttggcatagggttggggtgtatgcttcttgacgtacctacataatgaggaatacaaggctttgtatcttttatcagtaattattcatagcttaattgtgtaaattgtaaaatatcacacttttataatcttaatttttttttgtggctgcagctattatttgaataaactgtaattaattattttccctgagctgaagatttcatttctccccacactatctggaatcatgttgccctgaacatacttgtgcatatttttctacatttctgattatactagtaagcattgaacacataatgtgcatcaggcaccatgcttagtcctgaggatttagaaatactgatatttgatctctgtcctgagagttcttagtccaggagaggagacagaagagtggaaacaaaatcacaagagagtgtgtgagtttgcagagaaaactgccaggcagtatctgggccaaggaaggatgcccacctctgactaggagcaatgagtcagaaaaaaaaaaaaaaaaaaacttttttgaagatgtagtgtatgaattgacctggtgagtgttgatccttactcctaagccttccattttggcagcctcccctagctttcaccttgaatttttcttcagaccaagcataccctgataactttggatttgatgtccctttctctgttatcaatggctgagccttctctgcccctaagtgtcttctattcctaatgacattgttgctctgtcctctgagccatcagacttcaatccagtcctatttgtgactttgctaccatagtaatagtcagtggggttgcggtaaatgtttagcaacccacccacccaaacaaacagtgcttgctaattatcatggtgtaaagactcactctatgactgacttcaagctaccaacatcatgtcactgaacacagaattgggaagagaggtacagtagcatattatgtcatatttctaccacatagatacaatggacataaaataacattaaaagcataggtagtaataaaatgcagtaaagtaattagaagtaatcttcttggagtatttattacctttgtttttaatataattgattcaatcacaaatttacataattttgtttttaattgtggttctgtttagaaatatgctcacaaaattattgataagttcttgaaaaatagtctctggaatgtctatgtgaactatcaggttggtgcaaaagtaattgtggtttttgcatttttttaatggcaaaaactgcaattacttttgcaccagtctaatacttttagctcacaactggctatgaaccagttacatgaatttgtcgtgcctacttctccagactcagcttacacctctctccttttcactctctttacccgcccccccaacaactggcttatgtatgctcctcagaaaagtcccatttactcatatattagagattttgtatagatgtttcctctaccagaaatcccttcccctagctctttgcatttggagcctttccataattcagttctcagctcaaacattaccttgttgaatagatcttccctcagcacccgacttaaaccagtatcccccatatagtctcttacctctttttaaaactcagtgtcttcttggtcactgtaagtactgagtttatcttgccttttttgtctatttatttaatgttcctgtttcctaataggatgtgaaattactttgagtagactctcctgtttatcataaacagtgcctggcacttagtacatcttcaacaaacgtttgttgaataaatgtgtgcatgaatgacagcacctcagtgatctcactctgatgttgccgagaagggatgctcatgcaatgacttcagagtcttgagatcatacatataatgtatattatatatatattggtttgtacttaaacttggatcaaatgcacttgatttactaactgactttattatgactcaatgtaaagtctaaattctgctaagaattcctggaatagcctgcctgaaatcttattttaatgaaaaccatgacttcataccttaattgcattgggtttatgtgggctttggctgatctttagatttctgggttgtctgtgagggaaaagttagactaaaacgaaggatgccattgaaacaaggttctgaagaagttcgtgagtcatgctgacttattaggaagtctcctttgtgtctgcaatgagacgttgcatttttctctgaagtctgatgaagaaagaacagttttaggacaagtaaatccatcttaaatatcaatccgtgtctcttagattgttgtgattagatttgattgtgagtgacagaaacgtcaaaaaaatgagtttaaagaaagtagaagttaatttttctcatcaaattctaagtcagcagtctaaggctgctgaagtgatgctttatgatatcaataaccacaaatgcttcttctgtcttgaacctttcctcctttgctctgaaaaacatgtctccattcctaaatttaccttataatgcaatatggctgctcctgctccagtcagcatatctgcattccatcctgcaagaaggagaaaataaaaggagaagggtgtgcctcctctatggacactacttaggtattgcacagactacttctccttgcatttctttggccaaatattagacctgtagttacactcagctgcaagaaaggctgggaaaggcagtttttattctatgaaggattggggaaaactaatattgagtttccatttccatgcgaaagaaggaaagaaaatggagaacctagctgtatatgccacaggtccctttctttcctatcaacttgccaagcaattcctgaacatcagtgtaacttctaggcagactttccacactttcataacattggcaaatgagtaaaccaggaatccaaatgaatttacacagtttattgttcagggcacaataggcaacatgaggtccatattttcattgattctccttgtcccccaagtccatgggtaatgcagagtagatccaggtgtatgctgagcatacagtttcacagccaaggaacactgagcttaggacattctgattcatacagaagctgatggcaacttcctcatcctcctcttcaaagataggcattatctttaccttggcatggaaacaagttttcttctggtgagaggttgaagactttattattatggaatgtcttcagagatggagatgttctctgtaattattatactggacaataaataattctgctgtctgacccaaagggacagactagcctctaatgctctttgctgtgcatatatccttgaaaaggtagtccaagatatatagaaatgccatagaaattgtctctaacatctccatttgttaaattctttacaaatgcataaaactggttaaatatttaaggaagtagcttaatttaaaaaaaaaacccatcagtctagttgctgctaatagtacattgaatgtgattgttttgtttttgctgctttggagtttgagactttctatacaggacatgcatgctaagagatggagaatcccattttgcagcattagattcaatactcactgtaaggatttataagaacaaaccagaagactaaaacaaatggctgggaagagaatttcactagagatgtgtcaatgtgctgtgacatttctcttttgcttccattggaaggggagaagtattccctcctctttaccttataccaagttagggtggttaaaaagaacctaccagagagcttggcctacgtcctctggattttgcaggtgtagaaactgcctaactcgtgtataaaggcaagaaactggataacttctttgaatattgagcatagacagaaaagaagtccagagaagaagctggactccaccattggcaggacaaaggtatgtttttcttaaaataggctgcacggtgagataaccccaaaagacaattgattgtgggatggacctctttaagtcaggtggtattatctggactgtgagaccatgttgaaaaacctctgggaaatccccaagacaggtacaaaatatcccattagagaaataatcagaatttagacatcttaggtgtagacagttcacagaaataacaatagaaattacttttaaatatgtacaaacattgctcaaaataaggtacattctaatttaaactataatatgtttttccccctctagaatggtgagaatcaaaaattttggtaagttctcatggatggtctataggccacatgcctgggtacctaacatttgttctggtcccacagcaataaatttataaatgttcttggttcaagcaacttacattagcatgaagagcttgaatatgattaatgagaagtttgttcaggcataagggtaccctgtgctatatccatttcaccaaactgtgcaatgtgtgattaacgtgttatgctgaaaccaagtttgttgtatacagtcaagtccctgtccagaactgctttagtctcatgctcatcaggctgtgtgtgaaggaggagctgagcttccataaggtctagcatatctctcattcacgcaggcattatcatccacaagtgtgtaccccctgctgtaaacatatcctgcttgttcataggtgatactgatgatctttttgctgtgaatcttgactcagcagacctcttgatttactcaagtgatgtctggtctttctgtaaatctgaacttacttgttgacatttgcccagtggtaaagtatacaatgtcacattgggttgaaaactatagggaaagtggacattcttatattttgttggtaaaatgtaagttggtagaactcatatggattgatagaccatacataaccgtttaacggagacagtccaatttatatctggttttttttctgtgtaattataactagtacctcctttcactatcaaaacattccaacatggataataaattatatggtcatcctctaaagggtaatttgtcagtatgtactaaaatgatacattctcatgtcctttgactcatacattcaacttaatgtattatttcacatagctatcttcttacacatgtgtaaaatgatacatacaaagttcttcattaaagcattacttgtaatagtgaaagattagaaacaacataaatgttaatacttaccaacagagtactgatgaaataaattacgataatccacataaaaatacaatggagccattacaaaagaataaataaggtcttcctgtagtaaacagcgtgacctcaagatatatcattaagtttaaagtttaaaaaggcaaggtttagggccgggcgtggtgactcacgcctgtaatcccagcagtttggaaggctgaggtgggtggatcatgagttcaggagatcgagactaacctggccaacatgatgaaacactgtctctactaaaatacaaaaaattagctgggcatggtggtgcgcacctgtagacccagctactaaggatgctgaggtgggggaatcacttgaactggggaggtggaggttgcagtgagctgagatcgtaccactgtattccagcctggcaacagagcgagacttcatctcaaaaaaaaaaaaaaaaaggcaagatttagaatcatgtatagtatgctactatttgtgtaagaaaaggagggaaggaatatatgcatatacactatcataaatatttgcttaaagatctctagaagaaactgacaacattggttatctttggagaagagaatcaggtgcctgatgaacaggggaatgtgaaataattttcactaggttttatattttgatgtttgagccatatgagtgctcacctcctcaaaaataaatgaaaaaagttatatctaaaaggaaaaaattatataacttggagcaaaaaaataaaaatacagcaaaaaaattaaaatataagggataactttcaaatcagagaaagaaaatttgatctatatatctagcggaaagttaaaataggctctatggtgagaaaatcccaaaagacaattgattgtgggattggcctctttaagttaagtggtattacctggactgtgggaccatgttgaaaagcctctaagaaatccccaaggcatgtacaggtatatctacaatgcaggtagattaaagatctagctatgatagatctagatgctagagagaagagcacctctttggaactttgggatggggaaggacttcttaaacaatactctatagtacaaaccacaaaaatttttaaaaggatggacttgttatttcaaaattacttgttttattgtttaatcaaggaaggacaccagttgacaattaactgacagtgacacattgggaggcaatgtgttcagtgactgagaagggcacagagctaatatttggacacagagctaacagaaattattgcaacaaatctacaagacaggaatcctagtagaaaatgggtagaaaatatgatgataaactattcatagcatgggaaatctaagaggtataagtatataaagagatgctcaaactcatgagttatgagagaaattcaaattaaaaacaacaagacaccagcttatgctgatcagattggcaaaaattctgacctttggagaataccacatattaggtatacccaccaataggaactcttttgcctgctggttggtgtgtagactggtccaagccactctaaagggcaatctggcagcactttgtgaaattaagagtgcatgttccctatgattcataatagcaccactcttctatcccagaaaatttctaccccaggcctataagggaagaaagataaggaaatttatcacagtattgtttggggtggtgaaaaattagcaatgacttagatgtccataactggaaaataaagaagtcaagtgtggcaaatacacactgggatattctgaaccatttagaaaagcaaagaactagatacatattcagcagcatggctggatcctaagaacacagttgaaagaaaaaagaaactatgaaatctatagtacatccatagattgtagtaaatctatagtgccacatcacatatccatgaaaaatacatatacgcacaaacatttctatgtattttacaagttcaaggctaaacatcatattagagaagttgcctctggggaaaggcagtgagagtgaggaattatgataaaagagaatgaataaaaaaacaagagaagggtcatgtaggttttgtttctgtgccatgaactcatggattatgattaactcaaccttctgcacatgaagataaacaagaaagaactgataaacctgcaatggttgggtaatcttcaacttccaaatcagcaaaggtcagctctaagtttgccaagtacacaacttctcatcttgtgacatgttccccacctctgtgcagtgttaaaaaatacctcagtggtctactgactgactgtggatgcttcttctagatgtgcctttttttcctccatttccttagcacccagcactgctctcattatagcagcacattgcattccaaccaaattgaacaaaaaggtggcttaaaaatcatctgcaagtttatggcacaagcaatctcttatttttatcttagtgcataaataaatttttcctttttgccagaataattttttttaaagaagcgattagtttttcttctctcagatagcaatgatgtgctttcctctcaacctagatttagggcatttttatgtgagataggattaaaaattccatttttgtacaaccactatggagaacagtttggcagttccccaaaaaactaaaaatagagctactatatgatctagtgatcccactgctgggtatatacctataagaaaggaaatcagtatatcaaagagatgtctgttcttttatgtttgttgcagcactgttcacaatagccaagatctggaagcaacccaagtctccatcaacatgggttttaaaaaaatgtggtactttaatacacaatggagtactattcagcaataaaaaagaatgagatcctgttatttgcaataacatggacagaactggaggtcattatgtcaaatgaaataagccaggcacagaaagccaaacatcacatattctcactcatatgtggggtctaaaaatcaaaacaatctgattcatggagctagagagtagagagctaattaccagaggtggggaagggtagtaggggcctggaggggaggtggagatggttaataggtacaaaaaaatatagaaagaatgaataagacctagtatttgatagtacaacagggcgaatatagtcaaaataatttaattatacatttaaaaatacctgaaagagtataattggcttgtttgcaacacaaaagataaatgcttgaggggatggatgccccattttcaatgatgtgattattacacattgcatgcctgtatcaaaatattgcacatactccatgaatgcatacatctactatgttcccacaaaaattaaacattagaaaaaagagttgcattttcagctgttatggggagaagaaagaaaagctatcattttgttgtcctaaaaattatgttgtcctcatttcaaacaggaaagcaaaagtatttgagagccagtgcagtgccttggtgttgggtgaaacatagattgaatttgggccatttgtttaaacttcctaggcctcagtttcttgcctattaaaagggagtgcatagttcatgggattgttaagaggaagaagtgaaaccatgcacgtggagagcgtggcacagtgtctaagacagagtgtgcatgcaaataagtagataatattctttgcttttctttattgcatgcctgtaatatttttggagttgtcacattcattgccctcaagtagcatcaagggatgaaattatgtttgtaagaaaatcctgaggctgaggaatacaacatgttttatgtctactacactgaaaaatgccggagtcagataaagaatacagattctcctgaggatggaaatcaagatcttcgccttcaatatttaacaacattgagcttccaacttactatgggaaatattcatcaggcccctaaaggttccttttggacagaaattgcacttgttatatctgtattcttagcagacagtagacagcctggcacatcataaaggcttaaggaatcctaaatatcccttaaaattctcattttaaagacaaaaacaaaacaaaaaaaaaaaacaaaaaaaaactgaggcatgggcttgaccaaatcagtggtagaaccaagagttaaaccacttgttttgaatcctaaacctgagttttattttacttatttatttatttatttgtttatttattttcagatgcttggtcaaagaacagtgggaggagagggatgggcttccagcaacctttattattggcttattttcttacagcccattactttctcttgggaaaatattaagcaggcactcaaggcttgaggcccctgagttttcacatcctttctgaacctctgaacctgctttccagcattcttttatactttgttttacctcctggtcagtaatgcctcaccctcagtcttctctaaaagtgtggttaatggcatcttcctgactatttgaagaccactggccaaatcccaccagctcactcatagaccatccccctactttactttcttcaaaagacttagccctacctaaacttatttatatgtttattttctgcccaccagaatggcagcatagctggggaggcagagtctgttttgttcattgctgtattcccaaagactagaacaccaccaagcacacggtacaggtctcagtaattattgtcaaatttatgtggatttgcttttaaacaatatcttccatttactgagtgtttatgtggaagaactgtactaaattttaatgcatttctttattcctattcttaaaaccttccagcaaggtggctctaccaccctcttttccgagcttcaggagcagttgtgcgaatagctggagaacaccaggctggatttaaacccagatcgctcttacatttgctctttacctgctgtgctcagcgttcacgtgccctctagctgtagttttctgaagtcagcgcacagcaaggcagtgtgcttagaggttaacagaagggaaaacaacaacaacaaaaatctaaatgagaatcctgactgtttcagctgggggtaaggggggcggattattcatataattgttataccagacggtcgcaggcttagtccaattgcagagaactcgcttcccaggcttctgagagtcccggaagtgcctaaacctgtctaatcgacggggcttgggtggcccgtcgctccctggcttcttccctttacccagggcgggcagcgaagtggtgcctcctgcgtcccccacaccctccctcagcccctcccctccggcccgtcctgggcaggtgacctggagcatccggcaggctgccctggcctcctgcgtcaggacaacgcccacgaggggcgttactgtgcggagatgcaccacgcaagagacaccctttgtaactctcttctcctccctagtgcgaggttaaaaccttcagccccacgtgctgtttgcaaacctgcctgtacctgaggccctaaaaagccagagacctcactcccggggagccagcatgtccactgcggtcctggaaaacccaggcttgggcaggaaactctctgactttggacaggtgagccacggcagcctgagctgctcagttaggggaatttgggcctccagagaaagagatccgaagactgctggtgcttcctggtttcataagctcagtaagaagtctgaattcgttggaagctgatgagaatatccaggaagtcaacagacaaatgtcctcaacaattgtttctaagtaggagaacatctgtcctcggtggctttcacaggaatgaatgaccattgctttagggggttggggatctggcctccagaactgccaccaattagctgtgtgtctttggacaagttactgtccctctctgttgtctgtttactcttctgtacactgaaggggctggtccctaatgatctgggatgggatgtggaatccttctagatttcttttgtaatatttataaagtgctctcagcaaggtatcaaaatggcaaaattgtgagtaactatcctcctttcattttgggaagaagatgaggcatgaagagaattcagacagaaacttactcagaccaggggaggcagaaactaagcagagaggaaaatgaccaagagttagccctgggcatggaatgtgaaagaaccctaaacgtgacttggaaataatgcccaaggtatattccattctccgggatttgttggcattttcttgaggtgaagaattgcagaatacattctttaatgtgacctacatatttacccatgggaggaagtctgctcctggactcttgagattcagtcataaagcccaggccagggaaataatgtaagtctgcaggcccctgtcatcagtaggattagggagaagagttctcagtagaaaacagggaggctggagagaaaagaatggttaatgttaacgttaatataactagaaagactgcagaacttaggactgatttttatttgaatccttaaaaaaaaaaatttcttatgaaaatagtacatggctcttaggagacagaacttattgtacagaggaacagcgtgagagtcagagtgatcccagaacaggtcctggctccatcctgcacatagttttggtgctgctggcaatacggtccccacaactgtgggaaggggttaggggcagggatctcatcaggaaagcataggggtttaaagttctttatagagcacttagaagattgagaatccacaaattatattaataacaaacaaagtagtgtcgtgttatatagtaaatgtgaatttgcagacacatttagggaaaagttataattaaaaaaataggctgtatatatatcaatggttccaaaattttctatggttaagaatcacctgggatggttttgaaatggcagattctaagacaacttgattcaacaggtttaggtaaagcccagggaactgcattataagaaggaatcacctgtaattttggagtcaagatccaaggaacactcattgagaaacactgatttacaaagtgcatggagagaaatggagcaagtgaagggggatcagcatggtgaaatataggctgttaggagtgctattgactaactgtctggtgactggaccagagtaaatcttttactttgcaagaaacaggactaaattcccatattatgtccatagcaaagggaattatgtagaaaaattgataattaggagcctgagttcttgaccagcctccactacctatgtggcctcaggtgagttattttctccctttggctctaagttttccccatctgtaatgtaagggagtttaactagatgagcactaaggacaaatcaatttctgtgagtcaattattatgaaataccatgtgggcatcaaatgccaagtggaaagcatagataaagaagtgattgtgcacctgggctgaggggaacaaacatttcctaagagaattgagacccaaaagagcctttaaggaaggtgagatcttggaaagggaaatttggtgaatactctaatgaggagctaaaaaggcaagaaagaaagcagcttggctggaaaggaggttcctgtaggtgggcctccagagattcggtaccacagaaactgccaaacatcagcaagaagccatggggatggagcgtttgagggattctaaatagaaggacaagagtaaaaatgtcaggctggatcgatgcaggccactaagaaatggattcaggtgatggcagtgggaagaaaggacctgatgcccagaggcatttctggagaagatgagatcagacttgtgattggctgaacacacactgtagtggggtggggtttagggggtgactcaacttcaagcccaggtacattcaagtctgaattgccctagtcaaaagtggcatctgtggatgtgtatcagaaatatcttacttttcttggaagccaacaggagaaaagagtgctaccaagtgaactagagacaggaatatcttttgtcatttcaaggaaactggaaagaagaaggctcagtattctttagtaggaagaagacttaagtcagagactcatctgtacctctctggcagggtttaaaagggggaagaggaatagaggctgcaagagattgtgattcatggacagtatgcagagatcaaatgacctgggttcagatcctggctccactgctaactgtgtaactataggcaagttccttaacctctctaagccttaatcttgtcatcaataaaagggggcacttggtgcctaataaaacctacctcttaggttgttgccaaattacatgagataatccaaatcaagtgcttattataatacccagaaattataggctctaaataaatgtttatataggctctaaataaatgaagttttttagaaagataacatcatgatcaaaatgggatatttaacagtttagtcttccatttcatttgaagctccctaaaatcactcttgctgataaatttgttttttccttcacacctcagtttcatgggatgttttggcaaaaatctgaattttctgaattgaaagaattttttgctaagggtcatcagtattcatgcagggcttgttattctgagtcactaagagtttcctaacacagccttctctcattgagatgatgtaacatctattccattaatttcattaacttgcttacaagagagtaattgttctgcaaatttttttcttcccagttttaggtacctgctgcttattgtggacacacatagaattttatgtattatttttcgacttaggctaatgatttagcaaactctggaatgtcagccctaaccccaaccttggttttctgtcacatgcatgtagtaagtgctagatcctggacattctttgagatttagtttaagactaagtttattttctgataggttatttgtgtactttcatggattttgtaactctttttcaacaattggatgtctcagatctcagcatatgggagcaagttaatgcttcctgagatctttgccaaaggtcaagaggtcatttttgtgtatttataattttccatcatttttatatacttctcaatattctttttaaactattcttttccttttttcatcctctgaatactgttttgacagatcttgttattagcatgctttcacggatgagaaaactaagaaagctgaatgatttgcccaaagtagtccacctggaaaatgaaagagagaggattccaatccaggtcttacgattcaaaagcctgtgcatgttccatttttagtactttccacactgtatttctcaatgtctttctgggacattttataaatcatattatatcacctctaaggatctttcagtttgttatatatgtgtctattaagttagattgtgagctcctaaaagataaagcattgtcttattcatctttaaatttctcagagcccaaatagtgcctggaacctagtagttgctcaataaaaggtattgaatttacaggattgaatggtgacatcaatgaataattgaagattccttaagctgataactgacccagtagcatcattgatcatttaattgccctggacttacttattttccaccacactacatatttctgtatagaatatatatagctcattgtattgcaagatttaactagaagaaagagttcatgcttgctttgtccatggaggtttaacaggaatgaattgctaaactgtggaaaatgttttaaacaaatgcatcttatcctgtaggaaacaagctatattgaagacaactgcaatcaaaatggtgccatatcactgatcttctcactcaaagaagaagttggtgcattggccaaagtattgcgcttatttgaggtcagtgctacaatcatgtttgtcttggataatgtcgtagcaaacttccatgttcttttctagttagatgcaatgaaaagaacacaggatctggaacaggcagatttgaatttgagctcaagtttttacattaaccaactgtgtgaccttagttaagtcattcaatctctctgagcttcagtttttccattcataatatagtgctgataatatgtgccttgtcagtttcaacaggaactttgtgatgaaataatgtgttttgtaaaatgcctaatcatatgtgtgattaggcatgattaactataagtcatatgtgacacgtgattacatttcacataacatgtaatcacatgtgtcacatgtgattacagttaaagagtaaacaagaaataaatattaattcttttattcactaaattaatattgattgtcttctatgtataagtgtaaaataatatgcaagacaccgtccctttcttcaagtagcttaacccaaaactatgctttagaaaatagctaatgttcttcaagacattggtaaatgtcttatgattaaagtggttccataattaataaacttgggaaattcgggcatattattttacctgatttctttattataggacttttagagtctataaaactaattatactaagttgtttacagagagaaatgtatgtattattttccaaacttacttgactgtggatcctttttattttaagaacatgtattcacatctgggaacagagtttaggaaacgttgatttgggtgtttgctgggcagccaaacttcacagaactccaaataggtttcctcagccagattccttccgagtactatgctaatatttttggtgggattttgtcccacctgaaaatacattgctttatgctaagattcctgtgacctctctagctgattgggaggcaggggtagcacattggtcagggctgtgcacatacttagtgctcagtgtgtttgggcatgcaatcaacaaatccttttggggcatgactggatacgattagatatcttgtgaaaacctatgatgttctcagcactgtgggtggggaggaagatgggggacacatagaaattgtaaggaagagaaactgcctcctttaggatctaacaggggaagcaaatattctgagcagctggggagggaaggcagagcatgagaagttatctcagtaaaaggtagctttatagacatgatcttattcagtctaatgaaaataacatgaggtaggagctatttctgcccccatttttcagagatagaaactgatgcttagaggggttaggtaaatgtgcccaaggtcaaacagctagtaaatacggaagaaatcatttaaacccaggcattctgagtctagaacctacatacactcttaactgctattcagtactgccccagacagaacgggcttcatagtttgcagggcgcagtgcaaaatgaaaacgtggggtctcttcctcaataacaggaaataatgctgttaaaagtactaaaatatataactttatcctttcttctgtggtctctctcatgtcctgttatggtgtttttgatttgccatttagttgtgctctcctcccctgggcaccttggccctctaactgctgggttccctgtccagccagggctgggctgacagccaagcccctaccaaggatggggaaatccatcttccatttccgtggacctgctgcaccaacccacagtgatgagctatcccccaagagattgtaacctctggaatgagaatggaaaggaagcttgcctgaagccaaatcacccaccaaatcccctgccagatctcccagggttggcggagagtggcagcagaatataaacttccccccaaagcccatgcctcctggtcatgactctgggcaaagggcagtagtggtggtgaggtaagaccagggaggggaaggctgcgtgggtccagagggccaacgtgcttgaaagcaaccccttagaaccatggctgagaaggtaaggagagggcaaatggtgtgattacacatgagctgagtctccaaatacccagcatgtgcttcattgtcccactggactttgcttatgaaacacaaattcaaaagtcgttattaagaatttcaactcacgcctgtaatcccagcactttgggaggctgaggctgacggatcacaaggtcaggagatcgagaccatcctggctaacatggtgaaaccccgtctgtactaaaaatacaaaaaattagcccggcgtggtggtgggtgcctgtagtcccacctatttgggaggccaaggcaggagaatggcgtgaaccctggaggcggagcttgcagtgagcccggatcgtgccactgcactctagcctgggtgacagagcaagactccctccccaaaaaaaaaaaaaaaggaatttcaaggaggttgcaaagaacatgaaaccccaagtgtgattcctgtggtatgacagtggttgcatatcccagaagctggccctgacctcagacctcttttatcaagctttccctgaattaattacaatcttctcagtgttcccaaagcacttcttacttttaactgcagcacttccttgcgtgctcagcatatacattatgtctagccctgaggatggtttcttcaagaagagaaccttgtctcagtcatgtttatatcctcaacagaacctgagttttatatatgttgtgttcaattaagaatgaaattcaatctaaagaaaattttttaccttaataaatatttttaagttaaaaaaatattttaaaagtatcttttcactttttgagccaattaattttgttttttgagacagagtcttactctgtcacacaggctggagtgtagtggtgcgatctcagctcactgcaacctccgcctcccaggttcaggcgattctcatgcctcagcctccccagtagctgggactacaggcacatgccaccatgcccagctaatttttataattttagtagagacagggtttcaccatgttgcccaagctgatctggaactcctggactcaagtcatctgcctgccttggcctcccaaagtgctgggattacaggcgtgagctaccagccagggccaattaatttttaccctgagtttttaaatataattaaatcttgtgatcaaatatatgaataagtagagaaaagatagatctcctatttagagttccaaataatttaagtagtgggtttttatagtgactttttttccaaaaagtaccacatggaagggggagaagagtttctttacagtggagaaatatgacaaagacacctcagccatgtgaccaaaatcaacattattcaaaaagaaactgaatattaaaacaaacctttccttaatagtaaaaaaaaattaaaattaaaattaacatcatcagtgatgtcatgttgatggtatgcattcttggtaggatgaaaatggcacattacccctgtggtcttcctccacacaatccataacctccatctaaccatgagagaaaaaatcaaatgaatcctaattgaggaacattatccaaaatacatgaccattactcctgaaaactctcagggtcatcaaaaacaagtactgtctgagcgactgtcacagccgagaggagcttaaagaggcatgaagactagggccaggcacggtggctcacgtctgtaatcccagcactttgagaggctgaggcgggagtatcacctgaggtcaggagtttaagaccagcctggccaacatggtgaaacccggtctttactaaaaacacaaaaaaattagctgggcatggtggcagctacttgggaggctgaggcaggagaattgcttgaaccagggagacagaggttgcagaaagctgagatcacgccattgcactccagcctgagcagcgagagtgaaactctgtctcaaaaaaaaaaaaaaaaaaaaagagacatgaggactaaatgtaacgtggtattttgaatgggatcctagaacagacaaaggactttagatataaactaaagaaatttgaataaagtatggtctttcgtttataacgtgcatcaatattggttcattaattgtaacctatgttccacattaatgtaagatgttcatatgttcataatgggggacactgagtccaggttatgtggaaactctgtgctatcatttctattttttcataaatcaaaattattctttaaaaactgccttaaaaaattaaacctgggggaggagaatgtatgtctgagtgagagcaagcgagcaatgggtgtagagaagagagacagcattttctgagcaacaaactgtccatgagaaagaatatatctgtaaaatgcacctatgtaactttttagcttttatattagataatcagcattttctccttgagaggttgccccttaggcctaagtcagagttaatagattaaataatagtaaatgaacagaatgttttcaacctaataaataaacgacaagtaactaaattaccagaattggatggaatgcactcaagacatgtgtgtttgtgtgtgtgtgtgtgtgtgtgtgtgtcggggctgcagggggtggtagggaggggggcgcatgcatgtatgtgaactctgggtgaactctctgaagcattatccagaatctcaactgcacaggtcagtaagtgatgttattacacccattttacagaagaggaaacagaggtcactgtattgggtgattgaagaagggttgttagtgagtattgatttttttttttccaaacatacttcagaagttgctgtataaattgtataggccagtatacttctcgccttagtaacagcctggcaaaatgttaaaatcactcaaagtgctgagttaaggctgggcatggtggctcacacctgtagtcccagcactttggaaggccaaggcgggcagatcacttgaggccaggagttcaaaccagcctggccaaaatggcgaatccccatcactactaaaaatacaaaaattatctgggcgtgatggcgcatacttgtaatcccagctactaaggtggctgaggcatgagaattgcttgaacccaggaggcagagtttgaagttagctaagatcaccccactgcactccagcctgggcaacagagtgagactctgtccgccccctccctccccacaaaaaaaaaaagaaaagaaaagaaggaaaaagatgctacgttaagagagagaatcaaattctagtatttgtggaaccgcattatgcaatgagctgggcacatatgactcttcatttaatccgcattaaactaagtgaaggtggtactctcactttatggatgagggaactgaggttcagagcggttgagtaatttgctcaagatcacacagctaatgtgcagtggaaatggcattgaactctgaatctcagattccgaagcccatgatctttctattacaccccacacctctgccaaatacagctatccctgaacatctgaatcactctggagttttttaaaaaatgcaaatatcctggtcccagtctctcattcttggggtgagggggcaaaagtacctgtctctgggtattttttctttcatattgaaaaatgcatttaaatgcaagacaattaactactaatattccttccatctattatcaaccgctgttaacatttggacatatcactttcattttttcctgtgtcattgcagtttcaaatattacaaattaacatatcatttcttaagaaaaaaattagaagataaagctacagtcttttctcatctctcctctatcctgatcattctaattctacaaactttctagccaagacagcatcattatgagtttagcatatttccttccagtcctttggaaaagtatgttgatattgacaagtgtcatgctatgcacattggtctgcagcctctttcagtaagcacaatggagtggccaagaggatggactccatggatgcagggctgtggcttagagagggtgacttgacttctctgtgcctcagttcctcatctgtaaaatggaaatagtaatcgtatctgcttcatagggtagttctaaagattaaatcacttaatgcatgtgatctaaagattaaatcacttaatgcatgtgatctaaagattaaatcacttaatgtgccctcagaatatttattaactgttaagtaagaattactatatatatattttgtgaatgcaacatttaaaaaatgtatacatgctgatacatatagatcaggttcataacttttaacctctgaagtatagttcttaatatctgtgtatcatattttatttatcatccctctatttttggcatccatggtgttttctagtttctatagtcacagacaattctgcagtattttgttcaatttttttggtaagtaatatgcaaaaatttctttagggtagatacctagaagtggaatctggtcgtaggatatggacatttttagttttaatcagaactacaaagtttttctccaaatgtcctgtaagaatttatactcccactggttcaacatgagaatactcatttctctatacatttaagaatatatgcttattattgcctttaatcttgaacaatataatgagtgaaatatggtaatttgttgatttaatgttcatttttctgactattagtgagatgtaggtcatatttcataacatttataatttgtctttttgtaaattgtgatttgtctacacattgtattttttgtggcaaatgtgcctttttcttaccgattttttgacattttatatactctgaatactgttatgtgtgttacaaagattttctcccagtctttctcattttacttgggtttatggtataatttgtcatactgaaatttaaaattctgatataatcaatactttcagtcattttttcatgtgttttggatttttgtttattcttgaatttttttttttttttttaaattccactggtgactctgatgccaagtcgggaatgagaaccattgttctaagctattgcccgggaaggggttcttgctgtgcatgagagactgtgttatcacttcacatgaattaagtcatatttaatactcatcacagtgctgtggggagtcagcgatgccatactgatcttagagaggaggaaactaaacctcagagactcagtagcttgtctaaggtagacaaggtggtaggacttcagaaattgacctaggtctattatgctaaaacctccggccttatattttttttaatcagagaaaaaccaattgttatgagaaagcagaatgacacagcagttattttgcatctctttttgttgtaaagagaacgatctttaaactgggaatgttgaaacaaaatattgagagccaagagaagcttggctggtagatcttggtaccctgtccttggactagtgacttcaccccatcacctatctgttacttacaagggggtgaatcagggagctatttggggccaaggttttatgagaaatcaagagatcactatttgcccgtagaagaattcatatctttggttccaaacattatagtagccccatgttatgacataaagagtaggaggaatataggcttgatattgggcatctaaatcccagatctaccagtgattgacttactggtcttgctatgcctggtgtgactctgaggccacagaagatgctcacacaatttttattcctttacccctttcacgtgttttattttaccccatcaggaatctttgagaaagcgtgaagatgagaaagatgttggaagactagggagagtagaaagcttttattttaaagtgttgttttttgttttaatgaaaatctagaatgaatgacttgtattgtttgtgaatacttacagaaaaatggcaatgagcaataagagctggggttgagccattcgccagaagaaaagtagcttggtagagcagggggactgtggtgtgcatagtctactcgggtgtttacatctctcccaacatctttgtgaatgaaatggagaagcaagccatagatgaaaatacggatgagacctttaagctgtgcagtttacaacacatttctggaccctataaaatgaaattaaaggaaataagtggcaaaacaaatgaaataatctagactatactttagagcagtgtttcccaaataatattctgtcaaaatctgtatgatagtaggtattttatcagaaaagaattccaagggtcattatatctgaaaaattccacatctaggttttagagagccatagtgcacatgaacttattaaagactctgagaagttctgtagggaggaaacctgttcaatgtaatctcactcagcatttcctatatgtatttaccatgggaccctgtttagggaagatctcttaatatcttccaggcactagtgttccactaaactcatgctgttttagagttatgaactccaaactatcagtgataacctaggtttggggtcctgagggatggaatggcattggggttaaggatataccatctagagtcaaaccgtttggattcagaacccagttgcacaacctgtgagcttgaagacctcaagaaaagtatttaacttcttagtggctaggtttcctcattctaaaaattaagataagaagtagaagttctagtgaattggggccaaatgattaggagtataccaaaacccttacctgctaacctacaacatcccactgacctcagtagattgttccaactttcaattatttatgcattggtttaaacattttctgtagtgctctatatttttagcctctactagctcatgtccatgccttttaggaaaatactctcctgagagtctttactgtaagtggcttagtaatgggctacaaaatgagaagcaggctcctgggggaagtacactgttcaccttaccacatattctctagggaagggaacaagcaaacaagcagatgtacagagctctgagctccaaggtcatctctgacgtatgtgggtaggttcaaagacagcatcattcaattgatgaagacacagaggctcagactaaacaagcttccaggagctagacacttagagacaaaaactgcttcagaatttaccttccatttttacagtagacagaccttttggaagcaaatgggaaaggcacagtatctattagtcatacccacttttttgtgccctactcctgcctaggggatccactcctccccctcatcagatattcaatgatctcatcagatacccagtgatcatgacctcatcagatattcagagatcaatgacctcatcagatattcaatgatcacagaggttgtggcctattgatagcatatgagttgtgattattgctccatacataaggttgtttttttttgtttgttttttgtgtgtgtgtgtgttttttttttttgagacagaatctcactctatcccccaggctacagtgcattggtacgatctcagcccacctcaacctccacctccctggttcaagagactctcttgcctcagcttcctgagtagctgggattacaggcacctgccactatgcctggctaatttttgtatttttagttgagacggggtttcactatgttggccaggctgttctcgaactcctgacctcaggtgatccacctgccttggcctcccagggtgctgggattacaggcgtgagccaccgtgcccagcccacagggtctttttgacctagaatattttaccaatttggtggtataggaaaagaaacacaaagaaaagacagttcttttctctaaaggcgtgagctgagccagattaagctgcaaccctggctttctcctgcaaggagtctcccctgagttaggcagccccagccacctggaagggagggtgggggaagaaataatctcatgaagtgggaggtgactgaaagaaaaaatgtccaaagaatcacacaggagacatgccaagaggaagcaagagtgagatcccaaaagatggtctttggggtgagaatcccatggaaggtccagcttgaacctctccaagatctcctcctccagactagagtgggggataatcttgagctccctgtagaatttaattgtgctgctcatactttcttgaatatttctggtttcctgtaaatgccagtgggtttaatttccatattgttggtcaactggggcattgctggccctcccagaagaggaaatcagtgaaacatgtaagaagttccatcagtatctccttgcgacttctccaacctttgcaactaccgtatctcaccccaaatactgttgttgccccagacagttcctgtcttgtcccactacagtctagtcttaaaacagctgccagaatgtgtcttttaaaacatgaatcaaatgatacctctcttctgcctaattacctctcatagcttcttatatcactcagagtgaaaaccaaacaaagttcaggtaatggccaaaatggccttccatgatctattcctggtaacttctctgcctggtgtcttcacacccccgcttcctgctcactctgccccagtcacaccggtctccttgttggtctgccctcacattgtgcattctcttactccaggacccttgcactggctgttccctcacgtttttctccctcactgatttcaggttcatgcttaaaggttacctgtttatttttttatgacttcgtggctgcattgtttaaaaatagcacccccatgcacaatggtgtagccagtccctctttcctgcttcatctttctccatggtgctgaccaccatctgaagactgtatattttacttatttaccataactactgtttgtctcctcctttgagaacataaagctccacaagggcagagatttttttttctgcttttcccactgttacactccagcacctagaacagtggttaacacaaaaatggtgcttaactgagtgaattattgaatggtcctgtctatttacctaagaccagtgatttagggcattttttgtaaatgtctttgatgttgtccccagcaacctctgaaataggccaggacataacttcacttaagtttactccaagataacagcacatagtggtccaagaagttctcccttgccagtctattctcatctcaaaagatgcctaggctttccttctttttgaagtgtgctctcaaaaaaaaaattaaaaaaaagagctgagaaaaatttagggtaaaacaaatattgaaggataaaatgacacataaaatgtgatgtgctccatctttcagagaaatgggtatctataccaagttgaggaggcagagtataaggagtacctactgaatatatattaatgaagacaaaaattattaggtgcagacaaaaattgttgggtgcttttgcttttttaaactctcattaagctgccaggtaaaattatctttattttaaacacagaataccaacttcagaatggccaattaatatatccaaaggtagtgagtagcagaaccagaatttgaacccagatagcccacatacttgcaagataccattatctcttgtcagtgaataagatagaggaggaggaggagacggggcgcccagtatgcagtcaaaagaagatccagaaagacaagccaacttttcaccattatgaactctgtttctatagttttatttacttgtgaccaatccccctttagaaaggctttcttaaaggataggagaagaaagtggtttctggtgaatccttagaaaaattggtgattcatttcaccttgcctatatcttctgtttgaatcctgattagcaaggttttatgctgccatcttttatgcataaattaaatattagacaaatcgtgaaattgtttttgaaaagttcaagcctttattgccttccccgagatgcccacttggagtaatatcaagagtgctttctttatccctcagcaaagatgtggtgagcgtatatgggtcaatttgtaaacctacacaaacctcttgttgaaaagtaaaaattcatttgttaaaagtatgatcctaatcaggcttgtaaattaacttttgaggctctcttagcaatcaaaattattggtttctaaggatccatactagtaaattagaaagacgccaataaggaaattacatgccaaactggagggttattttttaacaaattgactcaaagggaaagaaatgatttaaacaattcagctctatgttcagtgtgtaattaaccagaaacttcactcatataagacttttgccaagtaagtagcagttacataactcccacaccccaccccccatttgtcagcccgggcataattttttaaacattttttaataatcccatacctatatctattataagtatttaccccaatggttatcattataaccatttaacagataaagttaagtttttattataaaagtaataaatgtgtctgggcacagtggctcacgcctgtaatcccggcactttgggaggctgaggcaggcggatcacgaagtcaggagatcaagaccatcctggttaacacggtgaaacctcatctctactaaaaatacagaaaattagccaggcgtggtgacaggtgccagtagtcccagctactcatgaggctgaggcaggagaatggcatgaacctgggaggcggagcttgcagtgagccgagatcacgccactgcactccagcctgggcgacagagcaagactccatctcaaaaaaaaaaaaaaaaaagcaataaatgtttctaggaaacttgaactatgattttaaaaaaagagaaagaaggaaacaaaatcatccctaagcccttcatctagagaccgccactgcactcatgtcttgaagtgcttactgacacgttttttaatacatgttgttgtttttgttactcactttttttttttttttttttttttttttttgagacggagtctcgctctgtcgcccaggctggagtgcagtggcgggatctcggctcactgcaagctccgcctcccgggttcacgccattctcctgcctcagcctcccaagtagctgggactacaggcgcccgccactacgcccggctaattttttgtatttttagtagagacggggtttcaccgttttagctgggatggtctcgatctcctgacctcgtgatccgcccgcctcggcctcccaaagtgctgggattacaggcgtgagccaccgcgcccggccgttactcactttttaatgattgcctaatcttccattgtgtaattataccacagtccacttcatcattcctctattatgggagtttagttagcttagaagttttggtgaaatgctatgtgaattttcccataagttaaatctctagcactagaaaaactgagtcataaaacataaattgttttattgttatcctcaaagctgtggaagtggatgcttccaggggtggggtatgagtgatgagcactgtatcctatggtctgcttcccagaacttcttctttgctcccctcccttccaaaactctcccacaaataagcgtgccagaggtgtgtccattctcggttcttggatttgctgtgctctcagctctacataaggcagggattggttatgtctccttttgaagtttcatcttaggtaaatagtaggtggaacctacccattctctttattcctgagccaagaaggatgacattgctctttgctttgtttaacaagtaatctctgtttgccagagaaagcttcagatctatctatatctctctggcattacctcctcactattctctctctccctagtggggtcccctctgtgggtttccctagccacagccctcaggggtgtgttgtctgcagttggagccataaataatggctgcaccgtgagcctgtttgaggttacttattatatttactacacccagaggttttaattatttgtgtttgacataatggtagtaataataatcaaagttgatatttgtggagtgctcactgtatgtatgcctggcaggaaaggcagtgtggttaaaaaactaatgactgaaattagaaaaaaaatgggcctcgctctctagctacttgcggccaagcaccttcatctctgattttatttttttatgtctcccttaaccttttcaaaggattgttgggatggtcacagaaaagaattctatactataaagtgttacttaagtatgaaaaggcatcactacagttcttttgaaccttataccgttaatgatcaaggcaaaagatacacctcttcaactacaagttcagtgaattttaattttttgaaattttagagttatttagttatattttcagatactttctgtccatttaaatattggaataacccctattatgtgtttgtttgttttaataaagtgtatatgatactccttggttttctccaaaataaatagcattactaaggaaatcacatactttctgactaagtagcagatgatttgctgggcatttatgttagaggaccaactaaaataaatgactttgtttttgtaataaccataagagctaaaatatcccatctaaagacactgaaattgagaagctgtagtaaataatcattattttcacatttttatggcatttaatgaaagcagcttcccagctctttgcacgaatgtgggagtgggatgcttccatgcttagcaagtgcttccagcaggaaaacactgactgatgactgcaggttgaaatctttgtgttgggggttcagtgtattttagtagactttgccaagtgttgctgctgaccaacattcattttttagttcatttctgcttcagaaccagtgtaaagagtccaggttttacaagaaaactgtggcataattacagatgagctccagtcccccacagcccattcttggaaagggacaagagagttgtaaataaaactcttgagtcatccagcctaatattttttagaggatgcatttggacaaattatacaacccaccttgtgcttcttatttatgtctggtgattttgcacctagcactcagcagatgccatagtaatccagaggagtccaaggaatttggttctacaattagggacatttgagacatcaagcaaactctgatactcaggcagttattgcctttgagaaagaagttattgccttttttctgataatgcatcacagctacattccttaaaaactctaagactatttatacttgtgatgttccaacattttttgagagcattttaaaaattgttttttcactgaggtgtttaagaatagccaagaataaatgtcagtttgaattatatatatatatatatatatatatatacacacacacacacatatatatgagagttaatatgaaaatataaaaaattattacaaatcagtaaaaaatctctataataagaaaatggtataaactgataattcataaaagaaatgcaaatggccactaaacctaggaaaaatgtttagtgtcatcagcagttaaataaaaaattgaacaatgagttatttgctgttttcatctgtcaagtcaagaatattgaaaatccttaaaggtggtacaggtgagaaacatggatcctctagtgggaagatagaagagatgagtatagactttctggaaggcaatgggacaatatatagagaatctttaaagggtagtttctgattaaacaatttgacccctaggcatttattctgagaaatcagttagacaagtaggcaaaactttatgtatattgctgaccgttatttctagtggcagaaaaacaagaagcaacatacccatcactagggtattggttaaagaatttatgaccacatctgtgctgcggatcatcaggcagccactaaaaatggtctgatgagggtacgaatggctaatgtaaaagcaggaaatatcttattcatccttgcattgtccaagtacctagcctggcccatgatatttgatttaaagacgatattcctcagggagatatgatgtgctctttttttcccgttggattcctgaaattctctttatttagccacatagacaacagagtaatagtcaaatctgagggtggcatggaatatgatggactttttccattttcctacccacaaactcttctcatatccttggataattttgatccttttgaggtgattatagaagacgtcctgaatgtaatatcttcttaccatttccactcccaccaacatagacatagccaccttcacgtcttgtctgcatttcagcaatggcctcttgacaggacttgcttggtctatcttatcccttaaagtttattctcaacatagaaattagactggtccttttaagcctatgagatcatattcttcctctgctcaaaatcttgcaaagatccctatttctttcagaatcaaaaccataattcttaaaatggcctgcaatgaccctgtgattattctgacactgtctcctgttattttccccttgacctcatccactctcatcaacccaccttgtggctgtctcttcaacaggccaggcatgctgccaccttccggccttcacctctctcaactcctttaggactgtacataaatcttgccatcccaatgaggccccatgtgcctgccctatttagtcctgcaatctgccctcaccctgtctcaggaatgcccatttgcttccccctgctctgtgttgcatttttgccttagtctttctcatgataacatgcacaaatgagtttctgtttgttgtttgtatcccctcaacttgaatgtaagctttataaaggaaagcatctttattttgttcactggtggatcccaagccgctagaaggatgattggccactgttgggtgttacaaatgtatatatttattgaataccttgaatggaaagtaattttatatacatatatatatatatatatatattttttttttttttttgagacagagtctcgctctgtcgcccaggctggagtgcagtggcgcgatcttggctcactgcaacttccacctccgtggttcaagcaattcccctgtctcagcctcccaagtagctgggattgggattacaggcacacaccaccatgcccagctaattcttttgtgttttcagtagagacagggtttcaccatgttggccagacttgtctccaactcctgacctcaggcaatctgcccacctcggcccctcaaagtgctgggattacaggcgtgagccacagcgccaggcctatataaatatattagtggtaattatattagataatttttactgagcatttactatgtgccaagtggtgcacatgtatcatatcatccaacactcccaatgaacttatgaagcaggtataattaagaccagcaagttacagatggaaaaactgaggaatggaaacatgaaagtacatcgtctcacaagcaataaatttagatattagatataaatcaaataagtctgaccccctattcaagcagaacaatgttgcttctatattatttatttattgtaattccatagaatttcgtttggaaagtgggggtgtttcctatgtaaatatttttggcagccactgtcctaaatattttaaccaaatcaaaatcttatagtggcaattctaggcctttagcagattttcatgtgattaaattgtgacatgtgaactaactgccccacctcctgccacttagtacttggttttaaagaagaaaaagtaaacaacttttgcaaatttaaggacttttttatactcttataaaaataattgtattcttgaactctccattttgttgcgttaggttttcctgttctggttctgcatctttggcctgcgttagttccagtgactgtctcctcaccctccccattctctcttctaggagaatgatgtaaacctgacccacattgaatctagaccttctcgtttaaagaaagatgagtatgaatttttcacccatttggataaacgtagcctgcctgctctgacaaacatcatcaagatcttgaggcatgacattggtgccactgtccatgagctttcacgagataagaagaaagacacaggtaagaattagaggaattttgcaacataagtaactccacactgtcttcataaaataacagcaatatacatatttaacagcatatttaaatatatgtatatttaatatatattgctgttattttgcggaagcaaaattaatatatatgtattggaaataatgccttggaagactgtttgggggattaaatgagtggacataggttggggacctaggcaagtgcctggtatattttagacatatagtgaattttagttatttttccccttcctaaagatagctatttcttttttcttttttttttttactttataagcttttaatttttatttatttttatttttctctctcttttttcttttgacttttattttaaattcagggttatatgtacaggtttgttacacgggtaaattgtgtgtcatgggaatttggtatacagataattttgtcacccaggtaatcagcataatacccaataagtagtatctaattttcaacaaaacccatgaaagcaagcaatgaagaaaggaattcctagtcaataaatactgctgggataactcgaaagccatatgcagaaaattgaaactggaccactgccttttaccatatacaaaaatcaactcaagatgattgaatggatttttgaatctctccactccaaccaaagggatctcttcaagtcctttttgtaacatgccaattccagagctggagacacctggctccttgttactagggctttcattgtcattttccatcttcttatctgtctcttcttctcatacaatctccttgtgggcaggtagactctcttacctatatttatatcctcagagtttagcacactgcttggtacacaggtgctctgcacatatttctgagtgaatgactaatataggagttgtcaaaacttgcattgtcccattatttacgtactgaaatgctactcatcctccggggaggaaaagggtggtagagtatagaaattataagtgtgggcttgaagttgaatagactgtggttcaagtcctacttcttccacatattgagtttgataccctgacaaattgctttaactgccctgacctcaatttttcatagggcttttgtgaggattaaatgaagtcatacataaacagtgcttagaacagtgcctggtgcactgtagggctggacaaatgatagcatgtggttgttattatgattatgattagcctgaaagcaatacagaggaagaaggtgactgctttttagggcctcaagcatattcaaatgaaccattttttaatagactttttattttattttttatttttatttttatttttttagacagaatttcgttcttgttgcccaggctggagtgcaatggtgcgatctcagctcactgcaacctctgcctcctgggttcaggcaattctcctgcctcaacctcttgagtagctgggattacaggcatgccccaccacgcctggctaatttttgtattttccatagagacgggatttcaccatgtttgtcaagctggtctcaaactctcgacctcaggtgaaccacccgcctcagcctcccaaagtgttgggattacaggcatgagccactgtgcctggccttaatagactttttaaaagagcagtattaggtttacagaaaaactgcacagaaagtacagagagttcccaggtctttcatccctacctcagtttcttctattaacatcttgcatttgtgtggtatttttttttagaactgatgagccgatattgatatattatcactaattgaagtccatagtttatattcgggatcatgctttgtattttacagttttattggttttgacaaatgcgtaatgtcatgtatctaccatttcaatgtcatacagaatagtttcattgccctaaaaaatgccctgtgctccagctattcattccttcttctttacagactccttccagcaaccactgctctttttgctagctccatagttttgctttttcaagaatgtcacatagttgaaatcatacagtatgtagccttttcagactggcttcctccatttagcaatacatatttacaaatcctccatgtctttctgtgacttgatagctcatttctttttgttcctgaataatattccatggtcaagatgtaccacagtttgtttattcattcacctattgaaggacatcttggttgcttccaatttttgatgattatgaataaagctgtgaataaacatttatgtgcagtttttttgtgtgaagataagttttcaactgattcaagtaaatacctaagaatgtgattgctgaggttaacttctttaaaaaattattttttttctactgtaaaatcgagtttctttcaaaaacacttggaaagactttgggtcaagaggagttcaggcaccatagctgaaagaagcatttgaataggcagagatgctttaaaatgagacaagatccaccccgtaaaacaggccactgaaacattttttaaaaggtagctccatggcctttctaggagactcatctctgccttcattctcctgtaggtataaccaaggcaaggaaagcccactccagtgttctggccttgtggagagtggacagccatgcagatgggctcaggtccctggagggcaggcacttggaattcctccctggattagtcctatcctgccttctttccttttcagcctcccaagctgcttccccaatgactgccctcccttgcttttttccggccacctgctctcaacaggagctgcagaccctttggacaaagggcctgccagatcctggggcaattcagcctctggttggagcaggtggaggctgggccagctggggccatgaggaaggaaatcaaagcaattgacaggcagacagccagcccctggaggagccagggaatatatagtaaaccagctggagagccggcagcctgaactggaggctcagaaaggaggttcttagtggggacattgagggggagttaagagtgcagattcaggaagcacggcgaccacactcggtgtgactttgagcaaatcattgacccttgcagtctcccactgtatcaaaggggagtcacaagagcctctgccttataggattggtgaaatcacacaagtgaagcactgggaacagagcagagcatgtttaattaaggacttaaagttattctctattcttaccattatcatcattattattataaacactggcatgagcacaagagcgaccaaaatgcagcctgtacacagctactttttcagagtctggcaactggaaaatgacctgagaggtcatgcagccctacagaccccttcatttttcattgtgaaaacagaggctgtgacttgccttaaggcaaacagtgggttctggggggtcatgcgcaagggtgtgttgagagcagctctgtgccgggcacagtgctaggaaagaaagggtcaatctgcctgttcttaaggagctcacagcctggcaaaggggaagacacacccaggtaagtagaatagagggacaggtgctgtgacaaagacagggttggtgtgattccgcctgttctccactcatgtttagctctgaggatccaggaagtaagaaagtaaaaaagctaatgttttcctttttttgagatggagcctcactctgtcgcccaggctggagtacagtggcacaatctctgctcactgcaacctccgcctctcgggttcaagccattctcctgcctcagcctccccgagtagctgagattacaggcacatgacaccacgcccggctaatttttatatttttagtagagacggggtttcgccatgttgttcaggctggtctcacactcctgacctcaggtgatccgcccacctcggcctcccaaagtgctgagattacaagtgtgagccacagtgcccggcctaaaaagttaatgttttcacatagaggcatcatgtaataaaagttgggtttattggagcctggaggaagcacagattcaattccctaatggggcttctcgctttcttgctcaaaatgtcaaagttgttgatatttgaagtgggatgacattttccctagggaagaaaaactagctaagaccaaccctttaaaataacatgtgttttgtgacccttatttcttcagatgattggtcacccaatcccatagtggctgcccccacctgaccttaccatacctgtaatgagagagctgatgttgacatgccacgacctggcatctgccaagaaagactctttgggtttctgtggtagtttccgtgaagtggggtctgggccaagaaacaggtttttcttaaggggaacaaccattcctttgcaaagttgccctttctataggactcagtgggagaacagtcagaggaagaaaagcattgtagtagatctgaacctttgattctttctccggacaaaatgccctttttattgtggggctcagatctcagaggcgagtctgacagcaggttcaagtaggagatctgaacccctcaaatcaattaagctaaactactttccactctagtttttaaaccattcaaaaagccatgtgggtgatagaaaataaaagtttttcagtttcttaattgcgaaagttccccacccaaaacagcttaagagaaggttaattacagcgacatggtaaagaaaccccaaccttctcaaatgcctcctggagaagctgatgtgaatttaataggattttaatccagagagtcttttgaatacttgaggtctattctcctgctaccctctttcctgatgacttcaaatccttcttcaacccaacatgaaagagcattaatatctttcatcgatcaatctactaatccttttacctttccctttgagtcgactgcatgacattacatttagtgggggctagaaaattcctacgtggagagagattgcagccaggagaagcagacagacacaatgtcttgggtagacagaagttaggaacatcaccatttgagaaatatgtttgcagttattttccaagagcagataaatatctgttgggttttgtttaatctatggtgattataagggtcctggtggggaagaaaagtgagttcaaattgccagaacaactactggttctgtggaaagcagaaagacctatctgcctgtctatctatctatctatctatctgtctatctatctatccgtctatctatccatcatctatcatctacacctgtctatctatcatctatctacctatctatctgtccatcaatcatctatcatctatctatctatctatctatctatctatctatctatctatctatctatgttgtctgggaacacttatgattactgtgagaagacaaaagcaacatcattatagtcattccttccctcttgttgcccctccttgccttcttgagtttcttctgcttcaacattgctgacctgaagaactgtgctgagtaaagctgacatttcagatcaattggggttgaagggaggataggattccttagagggctctgaaaagcccctgggattgtgggcaagataatacatgggtgtgcatgcataatttttaggagacaagatttttcaaaggggctatggttcccaaagagttaagaatttttagagagaagccgcttagggctggaagggaatccatctggttagagtttttccccactcccaccacctgcacttttctttcctctctcctttcctctgcttggcttttctgtctccaccttcccattgccctcttctcagttctaaaccttctcccgtgcatttcactttgtgcattccatgtgtgcctttcacagctgtagatgtatgtggctctgtgtctgcaggagaccaagtatctgcatgtttgcaaaaacacacaggattggctgtctttttcagtctttacctggatgcttgctggatgcactgatgtagcactaagtcctggcagctggggaggtcactcgtttcagcaaactgcctcactgagacaagcagactccagctgagaggatcagcccattcagggggaggtgacaccaacccaggagtgggaagcagagtcccttcatatccttggtagactgtctgctccctgcagtcagtcacaggcaactctattcattggcaaaggaagatcctgagcaaatgctatttctgcagcccatctagtttgccaggtcacagagcttcaagctcaggaagattacaaaattataaggaggctctcattctaagaggaatccctcagtgatatgccacacccagtgttttccaaattctttcgcattaggttatctcatttaagctttgcaacaaccaactcaggcagctaaagcaaacatagtattattcttgttttcaatattagaaaacaagtcagaaaggtataattaaaaggttgcatggattttccagttcaattcctgggctgtagctgttcggccaagttgctttccctctttaggcctcaattttctcatctgcaaatgaagaaatccaggtaccagtgtggttgtgtggattatatgatataatttgcataaagtgcctagcgtgtagggcccatgcaaaaggttacaagtaaacttacccttaagtctctcataagggtacacaatgaatcttagggttgagcaagtccaaactcccaaaactcctgaagtttgataaacaaaggcaaccgtgaaatgccatttgggtcagtccaaaagattgtgaaaggtagaaaaatttagactgggaatacattttctctgtgtgacaggtgtgttctctcaattgaagaaggaagtaaaaggacatggaatgactaactaaatatcactttgccatcatgctggattgagggagtattgtcgtgatgcactaagggccatgaatttagagtcaagagccaggatttgggtctccattttgtacactactagctaggtttgaattccatctgacacccttccagatggatgaccgcttctccttcatctgtgaaatggagcaaagacccactctcccaattcctgtggctcatggaggggattatgtggagtaccctgtgcataagggtgcttgaaagatcaaattggacttgcttgagttgaataggcccttgatcttagacatccttaagtttcaatagggagagctctctatgatctataaccccagccaataacaggtcacttgtcaccaccagctccgtggacatagacacttagcaggccaataataatatataaagagttggtggcagccaccacctcattgaagccaggcttacctagcagccacggagacaacttcatgtgtgggattgtatgagggtccctgtgaatgatctctcatttccaaatattttttgtgcttaacatcatccacttgactttgtgctagattgcacatggcactggcatatgagatagaaggtcagcttttcatgcagcttttctttctccttcccttctttcttcctcgttccttccctacttccaccatcctctttcctccttgcttccttctttcttctttcccttttttcttctcatcttcctttctcttgtaccattctgacaatactcaaaaccaatagcctctctttttttcatcctcttcgacatttttgtagcatttgatacaaatatcccccaggaattctctctttccttagcatgttatgaattatgtggcccttactttttaaaaaccttgactgttgggattttcttccttctcttactactccttctcaaacagcacagagtcagcgttgccaacttcctctctcattcacatctatctcctaattcagttgatcatttatgctaccgatattgattgagtgcccactcggtgtcagccacatgataggatgcaatagtgaaaaagacagacatggtgcctagacccatgcattttgtaatctagtaggttgtggctacatggcataatacatggcaatgatagagaagatggcatgcctcagtagtcttaggaggtgcaccaaggcactgagcccaggcgtggggtcagttgatgagaagaaggggagcagggccaaataagtgctcctggagtgacataaccaatacatggaggaggctttagatgtcttctgtttgacccaatgttgcttgaccataactagggttgtcagtgacaggtaaccagatctcaatgcaatggtgagctctcagaagacagaattagatatttggggatatgggggccaacctgccaatggataatgtttatgagatacatagtatcttaaaaaggatattgggagggtagttgtaatttaggtgggtggttggaataaatagccctacaggttattttatttattcataattccactcatatctattcactcactccctccgcttattaagcacagtttcactctttacttcatgtgtgagatcccttttattcatctggtttggggattcttatttttccatgtgaacagagagaacagatgctttgtcctaaaatcaccactcctgacttctgaccactgctgtctccaggaggcagagggtaatagctgggcatcatcagccagcctttggctcatcattcttgccaagagcttcctgaagagcattccttctccagaaagaaagtagaagctacttaaaagagaagaataaaaccctcaaaagtcttcctcctgcaggatgttggcatgccatctcttcttcctttgtgggagctgtggagatcagcacacagggactgcttctctggggggctggaggccattgcctaagaggagacatccgggagcctgggaggaggtggtgaaaacagccttctatttcagacccaagaaaccaggatttattgctctctctgagacaggctggaggcaagcctgggtgccttgctggctaacccctggggctggtgaacatcgggtggagggaggggctaagattggactcagcctgcaccttgaactgctgtaaattgaatgggcctcctctgacccactggccaggaagcaggctctggccaggcctggggggtcttttgctcagtggtgctcctgagccagccaccccttggcgtcccggctgagcagttgaccccgacttaatgggaccactacgtgggtgtccagggccagctctccagcgggctgcttcctttggagccaaatcaatatttattaatgatctgcccccaccgggtgcctccgctccacagagggcctctgttgccccagcctgcccaagtcattcattaaccgcggagcccagccgcccgccggagaggctgttaaggggctcacagaggccagcccaccggccgaggtatttggcaaggccattaatgagctaatctgatttaacttttcaaaacggaggcctgggtcgctggggtcagtctctatttccagctttgtgagagagaccgggtagggggaagggacctgcagccttcactaaagaaaataaggggtatgtgaagagaacttaggttaaaaagtgactatccctaaatccagggatgctcaggatggggcagactcaaggctgtcctagggatcttcttcaagcacctttagagccttagtttgtcacgcttcctttccttctcaaggtgggagaaaaggaatctaaaatttaaaagcaccccttcaccaccaccacacctttattctaagcccagcattgctttttggtgaagtgcatcggctgcaaaattgttctttcggctcagctagctcagtgatcttgagcaaatcactttgtctctttgagcctatttgctcatcagtgaacagcaataatgtctaccacctgggactgttttgcgaattaaaggagatgatgaaagtaaagcacttagcacagtatctggtgcataataagcgctcaagaaaatgtaactttagaggaaaaagggtagtcctacctttttgcctgggaaaaatcagaagagcccaggtgcagaggttagagacataagcatggactggcttggcctctagtggcctctgggaccactatcttagtcagacaagcaactctggagtttattatgaggctcaggtgcaaggactgatgccacagatgcacctgttttgggtcagtttcttcccaccccaaagaaggaggcaggcaagtgctcagcaccttgcccatttcacagatgcaaagccagagacgcaggaattaagtagtttgctcagacttccatgttgtgtgggtgggaaagatgagacttgaactcagacctgctggcttcaaacccaggatgtgcacaccctttgcacaatgtaaagagtcagcacatgtgtcaaggctcggcactgagtttgtctggggtcctctgtggtctctcctgaggtcctcacattgcctgcttcacaactctgcaagctgggaagtgagccacatcagggatcgacccccagtccccaacacccagcacccaggtgcctctccctggtcttgttcctcaggctttgtccctgctctccaacatgacagctggtgaatttctcttaatggttaggtctgacctgggtcctcatcctaccctagaagacaaataggctgcacccaagggcattaactttatgtaagggaatagatcaaatgtggagctgggctgctgcctggaggaagtgagcaccagagcttctcaccctttctcacttgtccttctataatgataataccactatcagatacttagaagcacttgtgtgccagacaccattctaagaactcttcatacatgagttcattttaatcctcccatcaaccctctgaaggacgtactattagtatagctattttgtaaatgggaaactagggaacagagggcttaagtaatttgcacaaagttccaaagtagagattggagctaggtggtctggctccaaagtgtgtatgatgagtccccaggctttgccacttctctggcctggctgtgttttggaccttttcttgaagatgatggggtcctgaagccaccaaaggcccctggactcaggtgagcaccctgcagcctcgcagtgctacctcggggtccctcacagcctctgcgacaaggtgcagagctcagaggtctgggatgtggtgagctgttttgatctttgtcttctttttacaaagacttgaatcctctgagtcttggcaactttctcaagttcttcaaattttttgttttcgttttgttttattttgtcttgtttctcctaccaagagggctgaatgaagccaggtggcccgataagaattttcctctggagaaggaaaaagtcacccagagctagaaatatgctggttctgctgccctctggcgttcgctgagcgccagccagcctgcacagccctgagtcaaggtggtgcaccctgactgaggtctgtggggaagaatgttgtttctctggtgggaggagaaaggaaaatgaggctgtgcatttgggagctgaacaaatgtagtgactgtacttctgaaaaataaatgaggttgacacattgattgaagtggagctgacttttcaagtatcatctggccagcctcagcccttcagaggatcccacaggtctctgaatatgaaactcaaaagggtttgctgcgccgataaatctaatacccacatgttacagaaactaaagcccaagattagaaacctcttaatacccaagctggacagagaaccagcttcctgatcccaatctctgttctttcctcctccctcctcctcttcttcctcctcctcctcctttaatcatcatcattaaaatctttgtcatattaatggttaacattgataaaacacatattatgggccactgtgctaagatgtgtcatattgctgcagcatttaattcatccaataatacggaaagagcattttaattcattttgtgaataaggaaactaaggctccaggagataagacacttgccagttacacaacgaaataagtggtagagactttctaggcttgctggaaaactttccactctgctctctgctatgataagctaaggatacagtagaaaaaaattttatatatatatatatatatatatatatatatatagtgtatatatatgcatatatatacagatatatatagtatgtgtgtatacgtgtatgtgtatatatacatacacacatatgtaactcacagctgagcagtaatactgtctactatgtgccagtattgttttccataaatcacgcatattaactcatttaacatcatgttgttcttataaagcaatactttctagtactactattatcaccatttcaaagataggaagagtgaggcacaaagagatgtaataacttttcctgggctcatagatagtaaatgcagagataagattcaaacctgggctgtctggctgttttaagactcttaaccattgctggactgactattcatgacacaaataggaaaccaactctggactagggccagatcctgagtatcccagatttcattgagccatgccaaggcaatttcaagtcaccagggtcttccctctggggtctagaggcagaggatttcatagtaaatagcatgttgtctttaacatcaaaaggacaagaggtaagagttggcaaggatgcggagaagagagaacccttgtactctgctggtggggatgtcagttggcacagccattatggaaaacagcatgaaagtttctcaaacaattaaaatatagctaccatactttccagaaatctcatgtctgagtatatactcaaaggaaatgaaatcagtatgtcaaagagatatctgcaccccctgttcattgcagtattattcacaacagccaagggaaacaacctacatatctatcaacaggtggatgaatgaagaaaatgcgataccctcctgacacacacacaatggaatattattcagccatgaaaaaagaaatattgtcatttgggagaacatgggtgaaccctaagagcattatgccaagtgaaataagccagacacagaaagacaaatactgcttgatctcacttatatccaattcaaaatgtgttgaatttatagaagcagagagtagaatggtggttgccagggggtagggtgatgagagaaattgggagatggtcaagggtacaaagtttcagtcataagatgagcaagtactggggggtcaaatgtactgcatggtgactattgttaatcacactttactgtgtacttgaaatttgctcagagagatctcaagtgtccttgtcccactccatacccgcacaggaaaaatgactacatgagatgatgaatatgttcattaacttgatcatggtaaccatgatgtatgcatttattaaataattacattgtatttataattttataatataaatatatatgtgttatataaaatatatgcaataggtcaggtgcagtgacttacacctgtaatcccagaactttgggaggccgaggtgggcagatcatgaggtcaggagttcgagaccagcctggccaacatggcgaaatcctgtctctactaaaagtacaaaaattagccgagtgtggtggcacgcacctgtattcccagctacttgggaggctgaggcaggaaaattgcttgaacccgggaggcgtaggttgcagtgagccgagacaacaacactgcactccagcctgggtgatagagcaagactctgtctcaaataaataaattaaattaataaataataaaatatatgcaatatatacaaatataattatgtaaatataaattatacaattttatgcaattgtaattttatattataaatatatatgcattttttattgttcaattataccccaataaagatggaattttttaaaaagaatttaaaaaagagcatccccatcactttccatttccttatgcttctttattcttcttcttcaagaatttcctgacattgtcatgtatttacatttatttattgcttatctcgtgttgtccctgccagaatgtaagcaccactaggatggtgactcccttgtatgcaccccacaatgctttgtgcttggtacgcaggaggtgctcagtacatatttgtggaatctcctttggtcattctaaatgtcccctaagtaagaaggggttgcagcaagaaaggacttgttctgccttatttctgggggcagcagttactgccagaattatgaacgattcccaggcaaaagagagatgatgaatgagtggaggcaggctacctccgcagtgtggggatgagattatccatggtcctgaacatagaggaaagagtcaggcccccttgtccaggtgggtgccattcattgaaaccccttggtggcaatgtcctggagaagcaagaaagatcttttagaagatgctgagccctgggtgactctaaagtgctgattcctttctcaagcccatgcaaacctgggtgggaaacaactcccattcttggcactgacaacagaggttcagtgtacaacgcaaatgctggacccactgaggaaggagagcttggggaggagtgtaggtgacaaggcgggaagccacgttcctcaccaaatgaacagagcatggtattgagtcatccgagactccaaagtttcagcagttgggaccaaggaggtctatcaagagacttgccctcattgttcctcagtttcttcatctgtaaaacgggataataataatacctacctcaaaggactgttgcagaaattgaagggggtagcatatgtgaaatgtttagggcagtgtccaacacacagcaagtacgacagaagtgttacctggagtgatggctgcagcatctgcctctgttcttgctgtccatagggagccaatctggaaaagagggctgtgctttaggggcatggaaacttctgggcaggaaatctggcttcacagtcagccctccttatcagtatgctctgccaccttcccatgattggcaagatgcattgacgatcaagaccagaggccagagagtcagctggacctgcatttgaatcctgactccactgtttcttagcagtgtgtgtttgagtttgcactaaacctctctgtacctcagtgtcctcgtctttaaaatgggaacattaatagtaccccccccccacaggtaaaatatttagaacaccattcagtgttagttttattgctaacatgggtggtagagagcctaggttcctcagctctgcagaaacaagggtctaaatggacctttatgaactgctggaatcagctctccttgttttgctggaatgcagctgctgctcctcctgaggctcctgtttagatcacggagggaatttccccagattggccactagatagcacacatgctctttcctgccccatctaagcaggtcagaatcatgaatcatgggtgtcagattgaaagtcacgttttatgtaccagacgctgagcggcgccctttgcttgtttctcatcactgcccacagcaatcctcagattcaagtagctactccaccagaaatgctccaccagaagtgcctggcacgtaggaaggcttcaaaaacacgtttgctgttcttcctatagttgtgtatcccagttgtttattcctcctcctcccggaggaggaactgagacacagagaggataagtaggcagatggaacccggattctaagccagaccgcatgctgattggaagttcagcatcttcccctcgacctcatttcaggggaagttctggaagccttgcactcacttcagggttcccaccacgtctattttggctctctggattctttttgaatctaccactttcttactcctggtgtgatctcaaatcagctatttaagcttttagagccccagtttcttacccgcgcaagaggggttatcatgccttccttattttgaaggtacgtcagaaatagcaactgtaccaaagcaggcactctggatggtggttactgctgtcaataccttaaatgttaacacaaccagggtgaatccattacttcccttctttcttccctccttttctttcttccttccttccttatcttgttttctccctcctttctttccttttcttccctccctctcttccctcttccttccctccttctttttctctttatgcccggtacaacaaagtacccatggtttctgccctcatgaaacttacggtccaaaatgcccttgtctctgttcattcctgggaaaatttcacctgcaatgtatcttgtttcctgtaacccacagggatgtcggtgctgccacctgcccttctccctgggcccctctctctgcaagacccaggtgttgtagtccaccccactcaagcccaaccccttccccactacactggctcagaagcaagtctgaaatcctttaggtgctgcaaggcatcttcagatcccaactatctgactctgttcactctgcttcaacaacggctttctaactggctttgcgatcgaaagattttgctgcagtgcctggggcctttgggagggaaacacataatgggaagatgggttctcatgagctcatttacagtagaacagtctggttttatataatttatattttgggcctatatgtaatattctgctgctaatggccggacgcagtggctcatgcctgtaatcccagcactttgggaggccaagggggtgggtcacctgaggtcaaaagtttgagaccagcctggtcaacatggtagaactctgcctctacctaaactacaaaaattgggcaggcatgatggcgtgcacctgtaatcccagctactcgggaggctgaggcaggagagtcacttgaacccaggaggcagaggtttcagtgagccaagatcacatgcaactgtactccagcctgggtgacagaagggaaaaaaattctgctgctaaagaaaaccatcaaagaaaactaccatgacgggtgggagggagatgagttttgagataattcagagaacatctccaggaaagagaatgtatttgggaatgggttttaaaaccggtttctaaggaaaatggagtttaacttttgaacgatagtaatttgggggttatctggaagccagcccacttgccatcaccattggctgggatccccacttctgatctcagcaaggcctttggccatgttctgccaatctgtactcaggacgttgccttctctgtgtttcagtgccctggttcccaagaaccattcaagagctggacagatttgccaatcagattctcagctatggagcggaactggatgctgaccaccctgtgagtccatggcccgtaggatgagattttttcagtgcctctcctccactcccctcccttcctcttaccttctctacttggagcaatgtacttgttcacttgttcaacaaacacttattgtgttcctatttacacgagggctgggaaaaattagcaagactttattgtcatcatcattatcatggtcattatttttgtaggagcaaatataaatcactgtccagaaactattgtctctatatactaggtctgtgtatgcacaaacacacacacagatgcaaatcatcattgtttctgcctgtgtacatctatggaggtttaagtcaagtgcttggtaaacagcaacctgtactaacaactctgccaactgcagggggcagcggggagtggcgacgttgaaactgaatcttaaaaactgagtaggagatgcgggtcagataaggaacggagagggcttatggctgaaagaacagtgtatgagaataccgagagtcttggaagcatccacaatactgtgggaatgactggttggtgcattaagtatgagaatgagagatgtggctggggcagtgggttgggatcagattgtaaaagggctaatggaccagaaagaggaacacggactgggcctgtgtcttgcagccatgggggcaggtcctttaatggtttttgagtagagggccggggtgggggatatttcatcgttccctctactctggggcagagggtctggggaggaacagcccaggctgcggtggctcagggccaggtctcacagcctccatcggtgggaagggccaccgtcctgttgcctgccctttattctctgccaggcaaatgactccttcatctttaaatgacttgcagccatttacatcggtgaaggttgagcagaacgcagaggaagcatttacacttccacaggagtctgttttctcctcacatttatgtgggtctttataatcagcaaagaatgttcgcaaaggcgcttttcaggaggcaaagcagatgcttccatcttacagaactagtgaggcccgaggagcctgatgacttttctaaggcccggtgctaaactgtgagtcctgagagctcatggtgcctgaagacaaaggcctagctagtggcagaaatccaggctcttttacagaggccaaaggcaagctatttcaggggcaagctggccttttgaaatatgaatgattgatgcttcttctaattcaaattgtaaaaccaattatagtgggcttgaaaacacagaggggcatgaggaggaagatgaaaagcaaccataatttcagttatttctatttttctctctggacagttctgcatttttcaaataatgagaaagcatatatcaacagaaacaaaggtgaatttcctccaatctcccagacttccaaacagaaaaaaaaaaatcacctattatcacactattctaaaataatcaataaatcaatattaatatttgggtgtgcctccatccttcctcctttctcgctctgtctatatatatatgtatatatatatatggtgtatatatatgcacacaaatatgtgtgtgtgtgtttgtgtgtattaactgtcacaacttactaaccagcacccaattgcaaacgtgtaggaagtttgagtctcacctatgtattttcacgtgaacttccaatggctgccttgaatattagttgtgaaattaaactaagttatatttaaactgaggataggaattaaatttaaagctcctagtgtatattacttaaatactctctctccccgaaaagtaaaggtaaatgtggggacttttgacccccattccatcctatataccatgtagcctactcccaggagccctggggcgccaaggttgctccaggtgggattctgctctgtgtacccgttcaacagatctctgtctggggcctcttagccatcaactctgtcagcaaagcatctccaaagatactggttctcagaaaagctgtctgttcacctctgacccatccaaggggtctgcccagcagggcgttattctcctcttaccaaactcctgtcttcctgccccaaaccggcattcttcccattcgtttcactcccttttcatttgggacagtggaagactccaatgcaaagagatggacatttttctccctgtatcctcaagtcccctccaaagcagctggcactggctttaaaactctctggaatgcattggtttttaaaagccacatctttgactccctgccctctcaatgttatgaattttattgtaaaaatacaacatatcaggtacacagttccctgaagacgaggcgccaggctctctctgttcctttcatttctcatcagatcccagggacgtgggccaaggacaaaacaaaccctccagcgtgctttcccagagaccccggggcccacaggcctggcctcagtgtgtgagtgcaaacagacaccagcacaaggagtggtgcagtcagcgggtgttcttctcgaaaggaccctctgttctctctgtcccgttgcatcctgtgtgatctctttgtccctgaacccggcccttggcagtatgcatggatgtgtgacccaatatctctcatcaggtcctccaaagcagtcactttgaaaaatgaagtaaaggaaggactgtttccaagacagagggaaaatggcctctgcctttcagttttagctaagtgggaaaatgaaatagggaagctagatttcctggtgaccatcttgcctcctttccccttctttcccagtctccttcctttcctttcccctttcccaccttgctttctttttttccaaaatcttttagttaactaatgatattaggagctaatgcttcttgagcaggggctgtgtgccaggcacaatgctaaatgcttggcattccttttttaatttgaatattatcaccaccgtatgagggctgtacatctcattttcagataagaaatctcagagggagagggccgtgtaacatcatctgtgtgtgaactatgtctcaggccatataaaagaaaggaggttgaagtgacagatgacatgatccctgccctccaggggcctgtggttgtacagtagagagagaaggggtgttgactgttctcaaagcagtgcaggagggagctggaatagtaactgcaaacttggcaggcagaatccaactggttctatttaatttccatttccaaaatttactcccctttctgtccatgttgttccctttacctgacatgttttttcttgccaacccacctgttatttccccacttggaaacctctattcatctaaggtctaaatcatatatgttgcctccctaaagccttcctcctgtctcttccaagacttaagtttctcacactgttactatctcagagatggcaacaatcacattgtgtttatactttgggtacagagtatcagatcacaataagtttacttcttcatgacttataacctcatgggaggcacaagatatatatatgcaagtgaaagggccatatgcatgtttccgaaactgtagtttatgaaaaatatcccatgatcaaagagagaaactctgtattctataaccctactttaagtatgcaaattccattatctcattagaaactttggaaaatcctgcaaaaatgaaacccagtcaatgcaatgtttcctaaaacttacttacccacggaactctttttaatgaaatacctagcaacattatcttatcgtgagtggtagttttccatggaatacagttgggataataactagtatataattatataataataactcaaaaaagtgcataaatgccaggtttcatgagtcagatagcatgtgctatcatttctaaggtcactgtgtactggaatggttagggaggacttctagaaagaggaagatctgagtctagccctctagcaaccagagcaggctaactgctcagcaaaaacccccagatctccgtggccaacccaataaaagttcacttccaatgtgggtcagtaaggaaactgctccacaaagtctttcagaaccaagcctccttccaccaatggctgtaccctccttcaactccttggagcccactcattctgccagtggatgggagaagagagagtgagaattgcttctgggaagttttcatgggccatgtctggagatgactcacatcccttcaatcaaattccattgagtagagctcagtcacgtgcccactactaactgcaaagaagatgggggaaaatagtttagcaacgttctctgaacaaaggagagaggacagatcttggggagcaccagcaacctctgccacatagacccccaactccagagctacctattccagtttacctggcagctgcactggagtctaggctacagatctacaatagagggggcttcttagtgaagaaaatatcagccaacacaactgtccttctgtggatatttctacttcttgacccaagtctttgaaactacatggttttttttaatggagtttcactcttgctgcccaggctggagtacaatggtgcaatctcagctcactgcaacctccacctcctgggttcaagtgattctcctgcctcagcctcccacatagctgggattacaggtgtgtgccaccacacccagctaatttttgtatttttagtagagatggggtttcgtcatgttggccaagctggtctcaaactcctgatctcaggtgatccgctcgcctcagcctcccaaaatgctgggattatgggcatgagccaccacaccaggcctgaaactgtttttaacctttcaaggtgtgggcatcaagttttcctgctctcctgtaggaaatttcttcttcagcaaattgcccaataacaagactatatttttcaatacttttctccttttctcttccttttgcccacctaattttctccacctgaggccctgtcagagttccttctaagagtcagtcagctagttgagtcatcaaagacttgttgcattcttactaaattgctctatccaagcataatttgtgaaaagttaaaaacataactgtcatgcaggtatatagtgaacacctgtcaaagatccatttaactcactattgagggaaccagcaagatgacaaagatagtgcagaaaagatacaagagacgaaagtacacgtggtcatcggaaaatagaaagccagaataaggtcacaaagatggatgcacaagtgattaatgttccataagacaataaagccataattatgtgtcttaacctttctactaggcagaaacaacttacaatttgataataaaatgaatattttgcaacttattggtcttctaaaaagccagcatctactttgaagtgattgtaactttataagtagtaaatatatgtccccttagagcacagagtgagcttgtgagacaatgatctcatatgacatttaaaaggcacacagtaatttttttgccctaggttttgcaaatatatatatatatatatatatatatatatatatattttttttttttttttttttttttttttgaggcagagttttgctcttgtcacccaggctggagtgcaatggcatgatctcagctcactgcaacctctgcctcccaggttcaagcagttctcctgcctcagcctcccgagtagctgggattacaggcatgcgccaccacgcctgactaattttgtatttttagcagagacaggatttcactatgtgggccaggctggtcttgaactcctgacctcaggcgatctgcccaccttggactcccaaagtgctgggattacaggcatgagccactgcacctggcctgttttgcataatttttgaacagcttctacttggggatatgctgagtgtgctatgccctgaaaatccagtgatatgtaaaagagtttcctgagtttaatcattattaacatatgtgagaccatctgaaacgagaaacatacaacacactgagagaaaccaataaactttggaaaaatccaggaagacagaaagaacagatagtgacttattggtctaaacgagtggggaagagggtcccactcagagggtagaacacgtgtgaaggccttgatgtgggaaagagcatggtgtgtttaaggaattaaagcaagaccagtgcactctgcagcatcataggaaggccagagtgagtcagcacagggctggacacatagacagagctggatcatgtaaagccttgtggactgtgctaaatattttggacaatagtctaatagcaatgagaagcccttgaagggcttttgaagaggcaagtggcctcaccagacttgcactttataaatataatttgggatgaagtggagggggtgagaggccacttacccagcagctacaatagtcaggcaagaaatggtggtggtcgaatgcaggtgcagcagtgagaatgaagtaggaaggacagactcagatgtttgaatggtagaatgggcagaaattgattgctggatgtgaaggaagagagaagggggaagtaaaacaataactcctggcttatgggcttgggcaactaggtacatacatttttccagaataggcttcttggccaattgtagggtgagcaaagggattgggcatggtcggtgctcccctagtctactgtttgcaagtcctccttgaccaatgtctataggatgggaatggcagctacttaataaatgccagtttgaaccttttgtcttctgtgttccatccttcccccagttgtcatgaaacattatgaaaaatgcaaaaagcctcttgttattggcctagctgaaatatacacagcaaggtaagaattctgtagatgttggtttaaaagccccttgtggctggtggggatcactgacccattccagagtacatcttttttatattctgagccagacttctctgtctttggatttcctgccattttgcacaaatgcatcatgctttgagcaactacaatgtgctcagaattttgcttaatgtgctgccgacattacctgacttaaactgtacaacactgtgaagcaggtaggattgacagtcttattttactgatgaggaaactaaggctctgagagataaactggccactcccaggccatgctccttgtgaataaatgaattagtattccaacacagcttttctgactttaaaacctgtgttctcactagcctaaagagagcacttctgaggtttaaccttagctatgatattaggaaatgatggaataaatatctcagtctacaagaatactcaagacttttccatatatgtagttaccctctcccctaaacccacccacacacacaaattatacctctcaatacatgcagacttcagttgatgtcatgacttgcatcctgtagaactctctcgactttctcccgtcttctatcccctcccctccccctcaccactccttcaccaacaatatattttcctgtcaaaacatacttggttacatgcagtgcaactaaaattgctgctattagtttaattgagacagggtgattataaataaattacatgcagtgctactgaaattgctgctattagtctaaattgagacagggtgatcagtcatcaccaactgtgatttgattcagaatgtactccacatggacggctacagaggccctgtggtcgtctggtagcccaaggaatgcaaggccagatccccaagaggctgggcgtcaggccacagagctctctgaccactggtaactgagaaagcaaaactccctgcaacctggttggttggggccccttgcaggctgataatgaacttagaaaccaggagctggaaagggtcatggttagaaaccttcccacatggaagatctgtatagtgcattatctgtgtgtgtgttcctgtataccaatgtgtgaatctcctgctacttcactaaaatgatttgagatggatatttaatactattttcttttttttattctaaaagaaacccgttctcacattagaaaacttgaaaagcataaatagttttcaagaatacaactgttagtgttacttatttttcccactacctggaggtaacacttgttagagtttggtgtatttctttaatcattttatttatatacttacatatttcctctgacataattgatatatgacataattgacataattgataatatcaactgggtatacagtattacattagcttttattttcacaagtagaaaatctttaaaccacctaggcaaggtacatgaaagataaacaataaaggcaaatgggggtaagaactgttcatggatatctcattcctagaagcagcatgatgaagtggaaatccacggattgaaggaattctcttttcttcctggattcctacttcagtgctcaaatctcaacttgccagcctagggaggaccacaaaatccaaatggaggtgctagttctgtagttttgggcctttaggcaaatggctccatgggcttcatattcttcaagtctagaccaaaatatagaaatggacctttctacaaggtgccttacagggtcaaaagtctacatattatccttagggcctggagaaaaactattcactactaactattaaataagaatggcaagtgagaatgactgtaacaatcaaaccttaatgactgaccaatattacatgtttattttgagccccaagtatggagatatggacaaataaatgttctttgtttagtccagtagacaggtttctaaaatggtgtgttactgatatttggaaagtaaatcatggtgcccagttttattttttttttttaaccacatcatctcaaaccaacttaccttcacccagtagaaacgaggcacaacagtagttttaagtactcagattcctaagctttctaatctgtaattaacgattaaaaaccattcagtgctctagggaaaggaagagttatactttgcaataaccgtgtcataaaatcttttctaaacagagtaatcacattatttatctgggatttagatttggagtaaaaaaaaatgtgtagtagttttacttcacttttcaagtgtgaaacatttggatgtttctatttttcaaaatatattcccggaaataaactaattaactcctatcttccctcccttcctttcttccaacaagtgtctgtagttttttcctgtgtgccagaatcaatgccgcagattctcagaacaaattacattatattacattgccctctgtgtctttacaattactggtaggccctgatatatatatatatatatatatatatatacacatatatgtatatatatgtgtatatatatatatatatatatatatatacacatatatgtatatatatgtgtatatatatatatatacacacacacatatatgtatatatatgtgtatatatatacatatatataggtgtatatacatgtatatatgtatatatgtatatacatatatacatgtaatatacatctatatatacatgtatatatacatctatatatgtatatacatgtatatatacatctatatatgtatatacatgtatatatacatctatatatgtatatacatgtatatatacatctatatatgtatatacatagagagagagagggggagagagagagagagagaaagagagagagagaaaactctcccaaaacaaaaattcaaccaatcaagcaaccaaaacaaaaaacaaatctaaaaatcagggaatatttctctttttaaaagtctcctttaaacattacactctgtgacataagcttttgttttgaattcactactgccttggtttggagggacagtggagcagagaaattgtgagctaaagtggtggatggcatggcttactgggaaaggcttggaagaaccacagcagagttctacggaaatgatatcagtctcttgtcttaccaaaatttagactgcaatcaactgtttttggaaaattgtctttcaatcagttggaatcccatttccaccccaaacactcaaagacacacttagcctcctttcactcggaaatgtgctgcttacaaatcactgggaaaaggctgcctgtgaatcagcttcagaggagactccattatcatcctttttaggtcctgagacagactctcagttagctaggcccctgccagattgtaaaggctgacaattactgatggtgatccaaatcccagcctcaccgtcactatggatccacttctctgaaccaccatttattccggaaagaacaggataatcatactcatcgaactcgcaagtttgttgtgagaattatatgtaaaatcagttcctagtactcacaaactggcacatagtatgtatttaatcaatggtatttttaaaaattgcaagagcaataagcatgtgcctgctcgtctatcaagaaattaaaaggtagagctagacacaaaccttaatcaggaattaaatggatattgtacatcttcatcatagacatccatcctatgaactttgcttagtttagcaagtgtgtcagtcagatatgctgtagatgaggtttctttaagaacagatcatgcacattggaatccacagcaaggaggctcatgctaaatcaaagaagttactaataaggtgtcactcacaatatctggtaggagagctaagtttaaccgagactttagttttagggtataaccaagggaaggagacatgcactgtcatggcttgagagcccccattcaaagcattcataaaggtaccagacctcttcctatgaagccttgaaaaatcaggtgtctcttttctcctagggttttaaagatcctgtgtaccgtgcaagacggaagcagtttgctgacattgcctacaactaccgccagtaagtctgccttgcttgttgaggggaagagagaaaaacacacccctagcctgcttctcccttgccctcatccagttgaggatggaaaataccagcatgaagagtcctgccttctgtgtgtgcatgtgttcatgtgcatgcgtgtatgtgtgtgtgggggtgtgtttaaaccctccctttaataacacatgataaaaaatgattgctgctagacaaaacaaaattacccactgtgcgggggccctgctctctcccaagctttgttgtctaattacgcagtggtgtctgcagtaattagaaaaggcctcggtcctgaataaaacagcctccggtcttctctacattaaacagggaagaaggaaaaagagaatcatttacattcaagaaggagctggctgctttactgaaataatgaatcattcaagatttcaggccagccaaacttcagctttctacttttatctggtctgacccagctgtgaaggacaattttaggatggttttttttttttcctgtctggggttctgtgttcctcccctaccctattttagccaaaagaaaatgcaaatataaaacatgtttgagaagacaacagctttgctcctttgagtcttaaggaactacagaaatgccaccatgggaaacttagtgttttgacaagtgctgttactgagttaagggattaagaaaagacatgcacaagaagaaacttaaaatttgtccagaatgctcatggcatagtactttgacagctttgatagaatctcagggagatggagaagatgatgggcctttctatactgaatacaaagttactttcaacatggaaaaacctccggaaaaagagagagaaagcttttctgaatgacttttggtagtggaagaattcaaaaatgtgctgtctttagtcagatctaagcccatctgggccttggatcctgctgagcaggattcacagaagatggtgacctccctttcctgactccacctttgccccagctcagtcaggtggacaccatcaaagcaggtacaggcaaaagtccttcagatagtcagcaataacagatcatacttattatcttcttgctgtgtgtctgggggctttggtgaatgctttgtatatatcattttgtttagcctcaataataacttctcatttttctgatggggtaatcaaagcttacaaaggttaagtaagttgccaacatcatgtagctagtatgtgacataatcaggttttaaactcaggtttgttgaattctaagggtatttttagccactcttctgagtgtctggggactcctagagtctagagactgcacttcatataatcaaggaggaggtgcttagaaagtacattcacttacttctgggttgctgggatttggggagagcggagacagatcctcctcaacctccttctcatagaaatgtgaaaccttatgaagaagagtgaaattggtgaatcacctcacaatcctggatgttaatcagttaacttggttactgaaaatcatctatagatagctggactctcagaagtacgttaaaattttttagtcaatttctcaccttttatagatgaatcccacatgattaactaactgatgtgccgaaggtcatgtagctagtaaagggctcgcctttttaaaaaattaaaagcctatttcagacttgactttatctcatctcatttaagctttcggtgctctttttaccatgtctttcttcttcaaaatagtctcttacttcagggtctgatatagttcatccttgtttttttttttttgcagattctattttgcgaatttgcctacttgcttaagtgtatttgtgaccccaaaatcgatactcactgtacactttcacagtcattcccagactagcacagagaggagaaaaaatttgattctactgaggtgtatatctccaactgaggtcaaagaaggcaacactctacctttctgtttctaccctcattttgtcaacatgtgtcctttacatggtctgtttagtgtcacatttttaacatttttgtgctttcgtttgtgattttgctttttaaaaattgaccaaggtctcactcagttaggaagcggcagggttagaattgagattctcctgcttttcccaggaaagcagtaaactgctgagccactgctatcaagcttgggatgagcagccccaataactgcataaaggggatactgcggtcactgctttagacttcaggggctggtgcgaatcagattaacctgcagaaaagcagaatcagaatctcaaatagttatgttcaagctaaatggaagactccagagtgaagcaccgaggcctcatctcctcaggttttcatttagatgtcaccttctcagccatgccctctctacaccctatgtaaaattgaaaccccactctgaaactccctatacctttgccccttttttctctatagcatttgtcatcatctaacggagttgtgttggctttctgtctgcctctactagaaatgtggactccatgagggcaggggtaattgactgttttgtcacagtgctcaattaacatttgttgaatgaatgaatgaatccaagagaccatataaaagtaaagattcaaaatggtgaattggaggcagagccaggaattgtgtctagaatcatctagaaggctgctacagcaggttttgatgatattactggagtggaagttgggcttttaagttttatctaggaatagataaaacggatcataggagcttatatttttcatctgcaaaacaactcaaacataaaggagagctctactggatactataaatgaagagtttaaggcgggtagtttaggctcaggcaggtccaggattcagcatctcattatttgcctctctgactctagtgtcctttgctttggccttgctttcagacattggcctcatttctcttggagagggaatctagcacctctaggctgatacgccaactcaattagaggtcctgtctatttccaacaaagtcaaccacagttctggcattgagtccactgactctgattaggacatagtcccatctctcagccaggcacaatgcaggagaatgagggatttcaattggcttagtctggtcacatgcccacttctgaaggtaggagtggagtctctcctcacctgaacctcacagactgagaggggagaaaggtgctttactgatgaatggggaacagatgttgagtccctagaacagcaggtgtcaaccagcagaacatcttggtgctcaggatgttaccatttcttgaaatttgttgcaggaataacagatgcctttcttttaaaatgagaatcagtcataatggtaatgatcaattatccaattgttaggatttgtcagtactaatactaggtactttatacatagtattagacttaaatttatccacaccatacaggtacttatgtttagcccacgtagcagctgcacagattgaggctcagagaggtttactaaattgcctgagctgatacagctagggaatggcagggccaaggattgaacagtctctgtctgtttccaaagtctgtttgtctcctgtatcagtgcttagtctcgataatggcgcgttcttgggcaagagcttacctgattttttttttttcaccatcattgctggctaccacaagaccttctgaacttgcctggctttcaataatacttaagcaaaatgctatctttttgcctaatccctgtcactcgtctgtagacaataacaaagactgtgctctaatgtgtttggatgaggtacaattctgaaagggcaagaaagacctaatctggagcctaatgatgatccataattctgagatcaacagtctcactttgtcccagactctgtgttcctgttagagaaataggcctgcagcctaggggacagtcactgatctttgaagtcaggctttatttggtttacatctgtttgtgctgttccgaacacagttcattcccaggtggttttcaaaaggactttttttttaaaatctttaatttagctttcattttaagttcaagggtacatgggcaggtatttacatataggtaaacttgtgtcatgggggtttgttttacagactatttcatcactcaggtattaagcctagcacccattagttatttttcctgatcctctccctcctcccaccctccacccttcattagactcagtgtgtgttgttcccctctatgtgtctgtatgttctcaccatttagctcccacttacaagtgagaacatgtggtctttggttttctcttccattagtttgctaaggataatggcctccagctccatccatgttcctgcaaaggacatgatgtcattttttatggccacatagtattccatggtgtatatgtacaacattttctttatccagtccaccactgatgggcaatgaagttgattccatgtctgtgctatcgtgaatagtgctgcagtgaacatatgcgtgtatgtgtctttatgatagaatgatttatattcctttgggtatgtacctcataataggattgctgggtcaaatggtatttctgtttttaggtctttgaggaattgccacagtctttcttttttttttttttttatactttaagttctagggtacatgtgcacaacgtgcaggtttgttacatatgtatacatgtgccatgttggtgtgctgcacccattaacttgtcaggtatatctcctaatgctatccctcccccttcccccaaccccacaacaggcccgtgtgtgatgttccccttcctgtgtccaagtgttctcattgttcaattcccacctatgagtgagaacatgcagtgtttggttttctgtccctgcgatagtttgctgagaatgatggtttccagtttcacccatgtccctataaaggacatgaactcatccttttttatggctgcatagtattccatggtgtatatgtgccacattttcttaatccagtctatcactgatggacatttgggttggttccaagtctttactattatgaatagtgctgcaataaacatatgtgtgcatgtgtctttatagcagcatgatttataatcctttgggtatatacccagtaatgggatggctgtgtcaaatggtagttctagttatagatccttgaggaattgccacactgtcttccacaatggttgaaccagtttacagtcccaccaacagtataaaagtgttcctatttctccatatcctctccagcacctgttgtttcctgactttttaatgatcgccattctaactggtgtgagatggtatctcactgtggttttgatttgcatttctctgatggccagtgatgatgagcattttttcatgtgtctgttggctgcataaatgtcttcttttgagaagtgtctgttcatatcctttgcccattttttgatggggttgtttttttcttgtaaatttgtttgagttctttgtagattctggatattatccctttgtcagatgagtagattgcaaaaattttctcccattctgtcagttgcctgttcactctgatggtagtttcttttgctgtgcagaagctctttagtttaattatatcccatttgtcaatttcggcttttgttgccattgcttttggtgtttaagacatgaagtccttgcccatgcctatgtcctgaatggtattacctaagttttcttctagggtttttatggttttaggtctaacatttaagtctttaatccatcttgaattaatttttgtataaggtgtaaggaagggatccagtttcagctttctacacgtggctagccaattttcccagcaccatttattaaatagggaatcctttccccatttcttgtttttgtcaggtttgtcaaagatcagttggttgtagatgtgtggtattattaatgagggctctgttttgttccattggtgtatacctctgttttgataccagtaccatgctgttttggttactgtagccttgtagtatagtttgaaggcaggtagtgtgatgcctccagctttgttcttttggcttaggattgtcttggcaatgcgggctatttttggttccatatgaactttaaagtagttttttccaattctgtgaagaaagtcattggtagcttcatggggatagcattaaatctataaattaccttgggcagtatggccattttcacgacattgattcttcctgtccatgagcatggaatgttcttccatttgtctgtgttctcttttatttctttgaacagtggttcaactacaagttctccttgaagaggtccttcacatcccttgtaagttggattcctaggtattttattctctttgaagcaattgtgaatgggagttccctcatgatttggctctctgtttgtctgttattggtgtataagaatgcttgtgatttttgcacattgattttgtatcctgagactttgctgaagttgattatcagcttaaggagattttgggctgagacaatggggttttctaaatatacaatcatgtcatctgcaaacagggacaatttgatttcctcttttcctaattgaataccgtttatttctttctgctgcccgattgccctgaccagaacttccaacactatgttgaataggagtagtgagagagggcatccctgtcttgtgccaggtttcaaagggaagggaatgcttccagcttttgcccattcagtatgatattggctgtgggtttgtcataaatagctcttattattttgagatacatcccatcaatacctaatttattgagagtttttagcatgaaaggctgttgaattttgtcaaaggccttctctgcatctattgagataatcatgtggtttttgtctttggttctgtttatatgctggattacatttattgatttgtgtatgttgaaccagccttgcatcccagggatgaagcccacttgatcgtggtggataagctttttgatgtgctgctggattcggtttgccagtattttattgaggatttttgcattgatgttcatcagggatattggtctgaaattctcttttttgttgtgtctctgccaggctttggtatcaggatgatgctggcctcataaaatgagttagggaggattccctctttttctattgattggaatagtttcagaaggaatggtaccagctcctccttgtacctctggtagaattcggctatgaatccatctggtcctgtactttttttggtgggtaggctattaattattgcctcaatttcagagcctgttattggtctattcagggattcaacttcttcctggtttagtcttgggagggtgtatgtgtccaggaatttatctatttcttctagattttctagtttatttgcatagaggtgtttatagtattcttgatggtagtttgtatttctgtgggatcggtggtgatatcccctttatcattttttattgtgtctatttaatttttctctcttttcttctttattagtcttgctagcagtctatcaattttgtcgatcttttcaaaaaaaccagctcctggattcattgattttttgaaggtttttttgtgtctctatctccttcagttctgctctgatctcagttatttcttgccttctgctggcttttgaatgtgtttgttcttgcttctctagttctttccattgtgatgttagtgtatcagttttaaatctttcctgctttctcttgtgggcatttagtgctataaatttccctctacacactgccttaaatgtgtcccagagattctggtatgttgtgtctttgttctcattggtttcaaagaacgtctttatctctgccttcatttcgttatgtacccaggagtcattcaggagcaggttcttcagtttccatgtagttgagtggttttgagtgagtttcttaatcctgagctctagtttgattgcactgtggtctgagagacagtttgttatattttctgttctttcacatttgctgaggagtgctttacttccaactatgtggtcaattttggaatgagtgcaatgtggtgagaagaatgtatattctgttgatttggagtggagagttctgtagatgtctgttaggtccgcttggtgcagagctgagttcaattcctggacatccttgttaactttctttcttgttgatctgtctaatgttgacagtggggtgttaaacgctctcattactattgtgtgggagtctaagtctctttgtaggtctctaacgacttgctttatgaatctgggtgctcctgtattgggtgcatatacatttaggatagttagctcttcttgttgaattgatccctttaccattgtgtagtgaccttctttgtctctttttatcattgttggtttaaagtctgttttatcagagactaggattgcaacccctgccttttttcattttccatttgcttgatagatcttcctccatccctttattttgggcctatgtgtgtctctgcacgtgagatgggtctcctgaatacagcacactgatacgtcttgactctttatccaatttgccagtctgtgtcttttaattggagcatttagccccatttacatttaaggttaatattgttatgtgtgaatttgatcctgtcattatgatgttagctggttattttgctcgttagttgatgcagtttcttcccggaatcaatggtctttacaatttggcatgtttttgcagtggctggtaccagttgttcctttccatgtttagtgcttccttcaggagctcttgtagggcaggcatggtggtgacaaaatctctcagcatttgcttgtctgtaaaggattttatttctccttcacttatgaagcttagtttgtctggatatgaaattctgagttgaaattccttttctttaagaatgttgaatattggcccccactctcttctggctggtagagtttctgccgagagatcagctgttagtctgatgggcttccctttgtgggtaacctgacctttctctctggctgcccttaacatttttttccttcatttcaactttggcgaatctgacaattatgtgtcttggagttgctcttctcgaggagtatctttgtggcattctctgtatttcctgaatttgaatgttggcctgccttgctaggttggggaagttctcctggatagtatccttcagagtgttttccaacttggttccattctccccgtcactttcaggtacaccgatcagatgtagatttggtcttttcacatagtaccatatttcttggaggctttgttcatttctttttactcttttttctctaaacttctcacttcatttcattcatttgatcttcaatcactgataccctttcttccagttggttgaatcagctactgaagcttgtgcatttgtcacgtagttctcgtgccatggttttcagctccatcaggtcatttaaggacttctctacattgtttattctagttagccattcatctaatcttttttcaaggtttttagcttctttgcaatgggttcgaacttcctcctttagctcagagaagttttatcgtctgaagccttcttctctcatcaaagtcattctctgtccagctttgttccattgctggcgaggagctgtgttcctttggacggggagaggtgctctgatttttagaattttcagcttttctgctctgttttttccccatctttgtggttttatctacctttggtctttgatgatggtgacacacagatggggttttggtgtggatgtcctttttgtttgttagttttccttctaacagtcaggaccctcagctgcagatctgttggagttggctggaggtccactccagaccctgtttgcctgggtgtcagcagcggaggctgcagaacagcaaatatttctgaacaccaaatgttgctgcctgatcattcctctggaagctttgtctcagaggggtacccggccgtgtgcggtgtcagtctgcccctgctggggggtgcctcccagttaggctactcgggggtcagggactcacttgagaaggcagtctgtacgttctcagatctcaaactccatgctgggagaaccactactctcttcaaagctgtcagacagggacatttaagtctgcagaggtttctgctgccttttgtttggctatgcactgcccccagaggtggagtctacagaggcaggcaggcctccttgagctgtggtgggctccacccagtttgagcttcccggacttttaaaactaacgacttttaaactatagtttgcatcagagtcacctggggagcttactagaatccagatatgtgagccttcccttccccaagagattcaggatctatgcggcctggcatatgtacttgaacaagctcagtgaagagaaggtatgaggcattttataccttagcatggatttatatatttattttctctcctttgttccaatatttatttattatccttgatctagaacttatttatttagttttctaattgacaaataaaaattgtatataatttttaattatatacaattatataattgtatataattatataattgtatataaaatatggtgtacaacatgatgttttgatatatgtatacaatgtggaatcttaattagtatgtatttaaatacctttataacttcccaggagcagaaatatcaaacccaataagtgcatgcctaccaaacaaaggggatctcagattcgtggcctacatattaaatccagtttagcccactggtttaattgctttagctaacaccataaaaatacactgtgttgctttaacttagatgccctggtttagaaagggaatatattctcctgccagcccccattctccttattgccaatctctgcaactttacagctttgtgatacctgactggcccgtgcaggtaagtgaatttctaccccaggtaagcaattagagaattagaagagtagaaaaaccaagtgatttcccgaaagtgagagcaaatcctcattgtagcctgtatcactgcttaaccaaatcaccctttcatgtgggaaatcaaaacaacaatgtttcctatatcaagatgtggaatttttctctttcaaataatgtatgaaattcactgtagcaagtgatggcagctcacaggttctggtccccgactccctctgctaacctaacctgcgttctgctgtgcccctgccctgcttgagacacctattttgtgcctgtattctagtgggcagcccatccctcgagtggaatacatggaggaagaaaagaaaacatggggcacagtgttcaagactctgaagtccttgtataaaacccatgcttgctatgagtacaatcacatttttccacttcttgaaaagtactgtggcttccatgaagataacattccccagctggaagacgtttctcagttcctgcagagtaagtccacatcagggtcaatggccctgcagaaagttgggggaggattgaggcagaggagagggaaggggaagacaagtatgtggaggcaagtatgaaagcatgtgcttgtaggaatgcatgcaggttgattcctccaggaagaactaaatttcactgtgctctgccttccctccagcccctactgtgtttatccactttcattcaatcaaacacctgaggctgtggattttgccgtgtacctgtccctgaaaagtattttctttcacacttaaagcccaaggtgcttcactgaggtttttttttgttttgttttgttttgtttgccctgtagttcctgctgtgttatgagttaggagtgtgtgtttgtgtaagaaatgtgctattttcggggatggtgccaagagccctgagctctgagtctgtgcatctggtatgaatcctgccttcaatcctctccagctgagtaaacctgcctcagttttgtcatctgtcaaatggacactgtatcaactctttagcttttcccatagggaaattatgagaatgaagtaaggtgctgcatatggaaacaaccagcacagtcttgcatatacagcaggtattcagtgaatttggactgaattgaaatctgagtagcttaataggtaagtacattgagtcgcaagcctctctgtacagtatatccaggtgaaatgggtgttactctttctgtcaagaggatgttaatttagcaaaaacaaaataatgaactagcacatattgaacacctactgtgtgccaggtagaataagcagaagtggggagacagactacaggttacaaaattttctatatatcagagctgtgcagagatgggccactgtgggggcaatgagccagggaaattacttggcaggaagggaagttgtagccaggacagtttgggggtgagttagatgaccttttgggtcccttccattagaaagtctttgcttcttagataaagaagggagtaagggtccaagcagagtgtgcttcagcctgaagacacagagaacatgggggcaagaggcaaggggatctcaaagacttctttagctaattacttccattgccatggccaataataagaataataaaacagtaatactagcagttgggaagctacataatagtaattaagagaacagactttgaagctagactgcctgtggctgtgaccttgaataaaacctttaacctatctctgtctcagctttcccatcggtaaagtgggcataataaaagtgtctacttcatagggctattgtggggattagtagcatatctaaagtagcttaaaacagtgtcttacatacagtaggtcaaatatagtgttagctattattaccattatcactgtcactatccttatcctccaaagtttgcaacaaactgagagacagatacaggaaccatagagatggtgatcagaggtcagctttaaaattgagcgatttagagaatgtgatatagatatgcacacaaatggacttgctaatattttaccccttaattaggtaaacttacctgccaattcatagagcatagtccattgcatggccaagagcagactggaatgaggtcctctgtgaacaatcaagagagaaagagcagtacagaaagagttaaattgacaatattcatattctcttcccaaatgctccagtcagacaggtcactgctacttatggggtagactgtgtgaggtgcagtacagaagctggaagcactctatccatactcttcccttctgggaaatgaggttcaaattccctcttcactctagaagcaggagaagtagggaatcattgttccaccctaacaaatggtaatgaaagctaaatttattgcatgtttccaatgtgctaggctctgtgctaagtactttgtattcattagctctttttattcttggaacatttctaagaagtatctatccacattatgcagatgaggaaactgaggctcagaaatgggaatttacttgatccagatcacctagctagaaagcagcgaggcagacatctgaagccaagtctgcctagcgtcaaagcctatgtccctgggcagttatgtgtactactccactacctaaaggtctcctagtgcctctgactcagtggtgatgagctttgagttttctttcttcttttcatcccagcttgcactggtttccgcctccgacctgtggctggcctgctttcctctcgggatttcttgggtggcctggccttccgagtcttccactgcacacagtacatcagacatggatccaagcccatgtatacccccgaaccgtgagtactgtcctccagctaccagttgccaggcacaatgagcgccatcttttcctgctgcaagaatgaggtttgggttcattgctggctggtccacaggactagttgtctagactgtttgctggtagtactaaaaacaattcatctattctggagatttgctccatccaagtagatagaccagactgattggagatttggtcatcctgtgatccaataactcagaactcccttggcagtgagaatgagagatcccaatcaagttccaaagtcaaagctacgaagttgcaaatgagaacaggaacaagtggcagccaagctatctcaatacttcctaagtatacatctagattactcttatctttctttgcctagattgtgtattgggtagaggtagagaattgcagccattatgcttcttacttgggtgtttcgttatccccttagtctgataaaacttatgcaacttataaaaaaattaatggaacatccaaaattgtttttccttgcccataaagttcattgctacaaatccaaaaagacctgttccaaatggacatagcacatacagtgttaaataaatgtaggttttcttccctcactgctgtccacctccagactaacagaagagcagcactgtttttgttttagttcccagtggaatagctgagcatattgtatctgcccagggaagtcaataccagggagaagacaggatgagaagtgttcatgactcatagctcacttaggtatatgggagcatgtccacaggaatattagctcttctgcctggtaccccactggggatactcttaagacccttggctgctgtgccctaccctgcacctgtctcttatttttccttccttttcttctttttaccttgtaccctgccttttatgatcccaacctctgcatatcacttattcctgggagagggatcataagcctaaaagagttatttccattctttctgcccattcctcatgtagaaagactgagtctggcttggcttaaacctcctcccctccgagctctctgtgctttctgtctttcagtgacatctgccatgagctgttgggacatgtgcccttgttttcagatcgcagctttgcccagttttcccaggtaaggaatggattttttagccttctagttataggtctgtgacctgaatttctcaaatgagttgagcccagggaggggtcctcatgccctctgcaagagcggaaaccaggtacagttctatgatcccacctgaaatgggtgtgtggttctgggaagctaaatacccatttcggagatcaagcatggggttggtgaatcactcatcctctgaatcatatgtgtgttcttcagtgtactaatctcatttttcctgctagagcctttcatccatgaaagcctccctgattcccatgcaggaactacctcaccttcttccaatctcttagtacattccccttaccttttcagggctgttgcaactttctaccttgtcaggcagttatttgtgtatatgcttgaattaagtgaggtgacatttgccaagaatccaatgctgataccctgacttagagttaacaaagaaaaaaatgagctgaatatcttatcaccatcatcaaagctgcaaccctgcaacctagaatttcattcatctttcacagtggttaacaagctcaaaaaaaagctttctttttctttttctttcttttttttttcttttaaggcaaggtctcactctgtcacccaggctggactggagtgcagtggtataatcacggttcactgcagcctcagacttctgggctcaaacaatcctcccacctcagcctcctgagtggctgggactacaagcacatactttcatgcctggctgaatgttttaatttttgtggagacagagtctcactacattgctgaggctgacctcaaactcttggcctcaatcctcccatctcaccctcccaaagtgctaagattacaggcaagagccaccacacctggccaaaaaagaaagttttgggctgagtaaaataatgctaccaattctctccaggcactgagaggcagcctaaaaccatggtttggtagctgggatcatgagaaggttgaatggtgttctgatgtacctaggctccaaccctgccactaaccagctgtgtgacctggggttacattatcagccaccctgtgcctcagttttaataaaagtggatcagtcaaaagccctctccaccagtcatcttcctcacaaagaagcacaagaatcaaatggaatgacctatgagcaaatgctgagccaagtattgggatttcagaataatgggattgtgtgtgaatttaatgggcattttccctcagctggcagaaataaacattcccactgtcaaataaagaagctaccactaaatatttgaaacaaacaaacaaaaaagtggaatttattgcttgctaagtgagggaaaactgtacttgtaagatgcagcctctctaaacaaaaggaaaattacttttatgtgaggtttggggaattatggagttcaaagatcgttggacttttggaagtggaagtgtttcgggattagttgaactttaactgtagaagcatcaccaatgacattcagaagtgtggttactgctgccaagatatctttgattgcttgggacagttttaaaatctggatttgttactgtggccaaaaaacaatcagatttttccttgaagaataggaaccttttattcttaccaccagaagttagtttacgaagtcagaggctaagtggcagtcctccttaagccatttccactttggggaaccccacagaagagtggacagttgctcaagtcaacaaacaggagctcttggggcatcagtgtcacatggttccaactttgatctggacagttccaaggcagcaagtcatgttgaaagtttcctgagaacattcctttttgatcagaggcaggacttgcttcccactacagtacaggatggagtggggctggagcacagggaatgtggggccccccttgttgtaggcaaactctaggctcacaaagaatggtgactaagagaacaaggcgccattttggtcttggatttatcagtggtttctagttgaattgagagagcagatccaggctaagaatttgaatttggttcactctaaatcagaaagtattttataagcctaatctgaaccaggctctggacttggcccagggagtgatatagagatgcagaccatgtagcttcttgcttcaaagtgggtctaatcatagtcttcatctctgtctacaagcactcctctggtgatctcactcaatttcatggctttaaataccatctctactctgatgacggacacatttacatctgcagccaagacttcaatccccaaattcagacttgcatattgaattgcctattcaacatctccccttggatgtctataagacatctctaacatcctatccaaaactgagttctggatcttccttctcaaaccttctccagcacagctttttctattatcagttcataggaattccgcccttccagctgatcaaaccataagcactttgggacattaccaactcctttttctcttaaccccacagccaatctttcagaaaatcctgtgtgttctaccttcaaaatatgtgtagagtctgaccatttcaattatgtctactgctaccaacttggtctcagccactatcatttctcatcctagtgactgcggtagcctcctcagtggccccctctagtggtctctaccctggacccctccagtctccatgtgttctgtctacactcagcctctccagtctcctggtgtcccatttactctcaacctctccagtgtcctggtgtcccgtctacactcagcctctccagtctccttgtgttctgtctaccctccacctctccagtctcctggtgtccctttaaccctcagcctttcggtgccctggtattgtgtctacactcagcctctccagtctcctggtgtcctgtttaccctctacctctccagtctcctggtgacctgtctaccctcaacctctccagtctcctggtgtcctgtctactctccgcctctccagtgtcctggtgtcctgtctacactcagcctctccattctcctggtgtcctgtttaccctctacctctccagtgtcctggtgtcttgtctaccctcaacctctccagtctcctgatgtcctgtctacactcagcctctccagtctcctggtgtcctgtctaccctccacctctccagtctcctggtgtcctgtctatcctcaacctctccagtctcctggtgtcctgtctaccctccacctctccagtctcctggtgtcctgtctatcctcaacctctccagtctcctggtgtcccatctacactcagcctttctagtgtcctggtgtcccgtctaccctccacctcttcagtctcctggtatcctgtctaccctccacctctccagtctcctggtgtcctgtctacacttaacctctccagtctcctggtgtcctgtctatcctcaaccccttcagtctccttgttccctgtctaccctccagtctcctggtgtcctactctaccctcaacccctaccatctcttggtgtcctgcctctaccctcaactgctaccatctattctcatacagcaggcagaaggagtgcttggtaacacaagtgagatcatgaccatctatctgctcattaccctgcaatggctcctgtttcactgaaaggaaaaactcaagccctaaaacatctaaaaatattctacatgatctggctctggatccctctttgatatcacctgccactgccccctcactaattcttctccagccacattggttcctccctgtgtcttgacccaaacaacgctgccttttcttgggaaagaaatgcaagcttttgcactggctatatgcttggccaacagtgtgcttccctcagaagtcagtataaccaacaactccacttccttcaagtctgtgctcaaatatgaccttctcaatgatgcttaccctggaaccctatttaaaattgaagtctcccctgaatcccctggagctcttagtccctcttgtttatttcttcttttgtttcttctttccaaagaacttatattcttctaacatagttatgtatatgttcattatttattgtctgtctccactaaaactcacaagatgtctttactgattttatacactgcctggcacatcaaatgaacttaataaatattttgagagtgaattaatatatacagtaggaaagacacatacacacaaggcaggctgcagtaagtgctgtaaaagagacaatgagacagtagaggaattctgcaacagaagctgtggtgagaattaatctatgatgtgttagactctccagctatatatatgcctggaccgatgtcaccacttatctgcagttctcctgtgatgtttccagggtacatgattaagactcatttaacattccaggaatattctgctgatgaataatcactgagctggagtcaagagaagaagctttagatactaaccgaccctgtgatcatgagcaagtcacttcccttctctgtgcctcaatttcctcacttataaagtgaaaacaaagggccaagtgagggtggaaggatccccctaccctggagatctgtgattctataacatatgggcaggaaagacttgataacacactcagggtctatgtgggctgttctgaaggcatctggccacccatcacctttttatggccaagtactaggttggttctgtggttccaattacaggaacagaacaggttctattttcccccaattacaggaaattggccttgcctctctgggtgcacctgatgaatacattgaaaagctcgccacagtaagtcccttctctccctgggtggatggtggagtgctataggctatggccctcaggtctttgaaactttcctactcccctggaagccaggttatctggggaaaaaaatcagaatgtggtgggttacatttgcacaagtgaaacttcacattttgatagatttctccttaataatttgattttgaaatcagctacctacagatgtttacatctcttaaattttaagcagtatcttgaacccaccaacaggctataatagtagcccttgaaaacccttggcataaagtgtgtgtatgaagtaatctggatccagagctttgaacatggaatgtttacatctctacttttcacaccagagcatacattaggatcttttctttctcagacatgagggagaaatgggggtgggctttccccttcttgctgaacactttcctctcctgagtatatctgatgacacttgtccactggggctatagaagcaattctacatagcaggtgatttccttccttcatactcgtttctaattttagtacatcccaccccagccactagccacattgcctgtcctggaagttgaaaaataaacatttataattgaattgtggactgccaatgagtgcaaatctattattaagatatatcagtttagaagcttatgaactcgttccatcaaaaggctaaaaactcccagaaggttatcttctcactgacagctgctttcaggtgctggacaagtggctttttcttcctcatctctaacaatgggatgcaatagctcatatcttgcccatctcaaaggcaactaaaaatttaactatttaaattgaattatttaaatttttgtgaacatgggtttttaaatgccagaggctacagagatacaaggagcggctttcaaagaagttacagagctagatagaatttctcatctctacaaagaaaataaacttggaagtcaaagcatcatgttatctgccataacaatattaaaatgacttatcaccaatgcgacttttctaaaaaattgttactgattgaaaaaatgttactgattggttgaggaacagtcctggattcttgctgcccttaatttgctgtgtaactacatgcatgttgccttaccttcctgggctgaagactcctcacctgtatgtgaggaggtcagactgactgagctctgacagccctcccaggtttaacattttctagtccaataaacagatgtaactaataacctacccctaattctccaaaactgtgactgtctccagcagctaactgagctctgggttcctcttagccccagaaccccaatattctttttttcaggccaactctctaggacatattgaactgtcagttattgaaagaaaagtacttggttatttgcataaatgcagtagttgacttcagaaacatccccaagttttagcatggatgatgggacattctcctcactgattctatcactacccagtctgctacctcccactgttgtgcctaatgagctctgccagcttcagagcatctgaggaacatctcagtctagttgacaccacagagaaaaaaacaaaagagatggaggagttcctgtcatatggagaacatattgttgggagcctccttttggggcttcttagtacctcctgatattttccatcatgctttacattcagccagcactcaacaggtgactagatagagtgagacacaggacacagagacgtgatcacaggtcatgctgattcagagaacaaacctgcacaggcttctacctgggcaatcctgtccatggcactggggcagttgctgccttctccttctttgaggtgtgtactagtcaaagatctccagagagaaagaaccagtgagatatatatagagagagaaagagagagagggaaatctgagaggggacttattaggggaattggcttacacagttatcaaggctgagaggtcccacgatatgctgcctgcaagctggagaacctgaaaagtcagtggcgtagattagtcaaagttcaaaagcctcagaaccatggaagttgatggtatagctctcagtctgagaccaaaggcctgagaacccctgggtggtggttgggtgcgagtcccagaatccaaaggccagaaagcctggagttctgatgtctaagggtaggagaaacagggtgtcctggttccaagagagatagaatacgtatgtggctttcctctgcctttttcttccatctgggattccagcccattgggtggttcccgcccacaatgaggaaagatcttccccactcagtccactgactcacatgccaatcccctccagaaacaccctcatagacatagacacaccccaaaataatgctttactatctattcaggtatcccttcatccagtcaaggtgacacataaaattaaccatcatagagtgtgctctcagattgactttccattccagatttactggtttactgtggagtttgggctctgcaaacaaggagactccataaaggcatatggtgctgggctcctgtcatcctttggtgaattacaggtatgaccttcacaggaaccaaggatagatttaaaagtggtgggtacagaaaaccattattgtgctttcaatattgttgaaaccctatttgtatccgttttgatatgcaacctgggaactcattctccagtgattggtaccttagcagctatgatttgatgatggctgtgggttttacagatagaaatggaattgcaagtacacatatctctggggagaaggggcctcctgattccaaggctgacctatgcatgcagccttgtgagtatgcaaacacatgccagaaagtgtggttggctcccacgtcatctattgaccaccttacttgaaagtaattggaatgaattactcctttctcccttggctgtaggttttagatgagctatgaagggtagaacctagtatgtgcaaagtaatttggctcacagcatttgggctgtgatgtagaaggaatcggggtgagatgagagaaggggcacaaatggcctatgggatgcagcagggaatactgatcctgatttaacagtgataataacttttcacttggggcctacagtactgcttatcagagaagccaaagcttctccccctggagctggagaagacagccatccaaaattacactgtcacggagttccagcccctctattacgtggcagagagttttaatgatgccaaggagaaagtaaggtgaggtggtgacaaaggtgagccactagctctgggggcctcctgactggtgccactcatctgtgggtggttggccaggagagtggactccaatgtctacagcaactttgtaccatagacagtttctctcccatgttctccaccctccttttcttccgttctctgttggaaggttgggcatgctgacctttgcacacacccctgccacctggtccctgttcaacgcaaccaccaagtcaagacactgaaccctcctgcatacagagtggccacagaagtctccccacaaaatcaaagaagtcttataacctaggaagtcctttcttcactttcttctcccaaacacctacaaaatttgcttcctcctttgtgtctttacccaaatttaatctctatatgtctttctctaaccaacttatttctactcatccctgccaccagtgcgtctgtaatacttattaacttgtaatatattacataaggtaagctccatgagggtagaaattttgttctttctattttctgtttttcctccagcccctggaacaatacctgacacagagtaagcactcaataaataattggtgaaggcattaatcccagaggcagttcagcaagaggctgatggagtggttctgggactctgagactgttggccctctgagtgcacagttcctgcacccaagcaggagacagactgggcagagggtccacctggacatgaatatcctaatactcactgtatgttaccacttaaaaaaatcttatcagtgatggatgacaggcatggaacatacaggcctttgggagtctatgacactgggtatgttagctttcaaccctatctatggcctctgagaggtcagaggaatggaggggagtggtgatagaataaatgacttctcaaagaaatccgcacttttgaaaagagagacatgagggaggaaagagagacataagggagaaagtcaaagacaaatgaacatacatcttagtccttcctttctaaatccaaattccatcccccccagacccctcacaaagaaaggtaaaaattatccttttgccagctcattcacttaccttacatttgcaaggtaagattgtgggacaagacaggtccagctaacatttgtttgagaaccctttggaataaagagacttcaaagaggactaactttctttcttttaaaatggatattccttaatttatgtctactatctttagataattaaaggtaaaatgctggcccacaaatccacttggtgtggcctaaaatgactatttctccagctctgtccagagctctcaagtccttctggctctgcttttttaattctctcctaaactgggagcctagcctccttccagcatcatccccctctccctccaaggcccaaggtttggacccaggcattggagcttagaggcagtgctgatgagcaccctgtcatgccaagatcacatttggatgggccctcctggagacaactctctaaccagcaagtgatcagtcccagaccagcagggaagagcttgccaggaaacaggcctgtcagtaccgaggcctcaagggaaacaaccatgaaaaccccattctgctgagaagtggctcagagaatcaaagagaatgctaaagaacagagttcaaaacaaggaatctgcacatccctttggattccctcaaagcatctcagccaagagaaaccaattctaaccacttggagttttaagattcaagttgtaggcagagatgtgattggctgagcatggttcacatgctacctcctttccagaggagggctggcaccgaatactgacttctggactgatacacacctagtagggtaggggtaaatcacccaaagcaaaaatgagctgctttatgggaagaaggaggaagaggtgcagagcaggcaaaatcacagatgtgtaacatgtggctcatgccaccagctgggttgagacagctcctttcagagaagaaggggtggaaatatatacttggccatttgttcttcatgaaagatagcaactaacactcatagggcacttacaccatagtataacagcatttgctgcaaccccctgaggcaggtaccactaatgccccaattttacagaggaaattggggtacagaagagtggtcccctgtgcccatggtcacaagggccataatagacagaggcagggtttcagcccaggcagcttgacttggaacttggggagccactcttgccaaacttggaggtccctactgtctcccgtaacattgtattttcagtacagcagcttataggttcaccagaggccaacttagaaatctgtgattactttgcaacatcttgttaatggtattgcatgatgtccctcatagaggccctcatggtggatttctcccagatccaggagtaaggcactgggaaggcaggaaagcaaagggtccaggccagtgtcagactgcctgggttccttcccagctgcataacttactgacagtatggccttagtagtcacgcagccttcccaagcctgtttcctcatccataaaatgggtatagcaatggtgcctttctcctaaggtttttgtgaaggttaaataaggaaggatatttgtaaagagcattggacagttagaacttaacatagttcttggaacatagaaggtactccatcaatgttaaatttcattattaacatagtgctttcttcaccacttgagagctatttccctctgcattgattgtcaaccatttcagagcttttttccctctatatagcattctttagctagattttacttactcttgattttatttaatgataggagtttgtggctttattgtattcagtagtttcattgtaagctatctctgtcttcttggagccaggggactaaataaacatgtgtatatatgtgtttgtacatacacatacacacatacagaggcttcccaagaagactcattaaaactccattccccccgcctcagccctggctgttgaagaccctgctctagggaggtgtccgtgttcctaaaaaagaagtaaaatgccactgagaactctcttaagactacctttctccaaatggtgcccttcactcaagcctgtggttttggtcttaggaactttgctgccacaatacctcggcccttctcagttcgctacgacccatacacccaaaggattgaggtcttggacaatacccagcagcttaagattttggctgattccattaacagtaagtaatttacaccttacgaggccactcggtttctcagtaatcgaagactgtctttccctaccatcgccataggaaaaataataaatttattgaaatatttaattaaggagaaaagcacctccatgtaagccatgggttcattgatggagaagaacttgacaaaaaggtcagaattacccttgtgtcctttttcctttgaccttcctagattccactccacctcctaccatcattccacctttccacacttggtctgtcactgccatgttcctttttctccctcgcctctccatcccttctacgctaagtgtccagttgttatcactctgcctggttctatccactttataagctgtccagtggctcatctgttggccttccactcttccttcataatgagaatattataataattgcccttaagaatatcacagggttacctcatttatcacctgattatctctctagcccttcatactctcttccagcaacactgatcaatttttagttctcatgctctttccagactcctaacccttgcccatgcagttgtttatgtttaaaatgttctcctttccaatctcatttacctggtatgtgaagacatagcataaatggaaggctgcatcacaccttcatccagtgatcttgccatctagactgagttatctgcttagaccatggattctaaaatttgaatgtgcatcagaatcaaatgaaaagccagctaaaaattaatagctttgagtcatagccaaggctaaatttaccaaatttgtgataacttttgggagtttatagacctcaggtgattctgacactagagttttgtgtgaaccatactattaggttcaatgatttcgcttcttgtagcatatgcagatggtaatgtaaaagagaaatggaacagctaatgatttgcctggggagagacctgttaagtccttccctgggaagtgacctatggaaaagggatgctgattacattaatggctctggcattttctaaaacatgcaagtacttataccataatgaggctgtaagctccttgaaagttggggtggcacccagctcatccaagaagcccacttatcccctagtgctttgcactgaggacacttgaagagtttttgcttattatacaagtggcccattttgatggtgtttttctttgtaggtgaaattggaatcctttgcagtgccctccagaaaataaagtaaagccatggacagaatgtggtctgtcagctgtgaatctgttgatggagatccaactatttctttcatcagaaaaagtccgaaaagcaaaccttaatttgaaataacagccttaaatcctttacaagatggagaaacaacaaataagtcaaaataatctgaaatgacaggatatgagtacatactcaagagcataatggtaaatcttttggggtcatctttgatttagagatgataatcccatactctcaattgagttaaatcagtaatctgtcgcatttcatcaagattaattaaaatttgggacctgcttcattcaagcttcatatatgctttgcagagaactcataaaggagcatataaggctaaatgtaaaacacaagactgtcattagaattgaattattgggcttaatataaatcgtaacctatgaagtttattttctattttagttaactatgattccaattactactttgttattgtacctaagtaaattttctttaagtcagaagcccattaaaatagttacaagcattgaacttctttagtattatattaatataaaaacatttttgtatgttttattgtaatcataaatactgctgtataaggtaataaaactctgcacctaatccccataacttccagtatcattttccaattaattatcaagtctgttttgggaaacactttgaggacatttatgatgcagcagatgttgactaaaggcttggttggtagatattcaggaaatgttcactgaataaataagtaaatacattattgaaaagcaaatctgtataaatgtgaaatttttatttgtattagtaataaaacattagtagtttaaacaatttcactgtttcagttatttcctggaatgaaatattcctctcactgccttagaaatacattagctagatagttttgtaacatgagaaaatggccagaggctcatatctccaaccctttgcaggggctccttgtgacactcaaagtcatgcctggacagtcaacggactttgacttttgttgattgtgtgtttgccatgaaaacatgaatatctgagaagcagtggggagaaaaaaaacaatatctttgtagctatgatttgaaattctcatactactttacattttattttggaaatagttaagtcttaaagaatttgcatagtgtttctttgagtttagttctcagaacagctgtagtatcatcaacagcaaattctgggtaccttcccagctccacccaatttgaatctctgaagataaggcccagagacctgtatttttaagtaccccatttttttaattattcatagccaaattctatcaggtacattcagtttgagaaaacctgatttgtggtggtcagtctgccactgccaatgatgtcaatgtggataagctgtttcccttctttagacctcagtgtcactctaacaatgagggagttaaactttataaaccaaggtccattgcagccttgaaatatgattcaagtgttcatatgtgtctttatatagctatgcctgatccactgatggggtgttacaatacctgcttatatatgccagctgggaggaaagaggaatttactgaatgtgtctgaagtttcattgttttgaagttggaattttatgcctgtatctatgtttatgcctttgtaaaacccactgattttaaaagtgaaaaaggacttttttctctgcttttactctaaacaccaaacaatccctgcaaagggattattctgatgtttcttcatttcacatgaaaagttaattattgactctggaacttaaatattagataatatttttgacaatattgaagagtgagttttagtccagtaaagatgttttaatgagcttgaaggtaaagtttcggttaagttatgattttcacaggaagttacatactgaatgaaagataatatttgtatttttggtaatgtgctactcagttcttagctcttttttatccagatataaaagcccagtctatagctatgggatttaataaatttccaatatgtaagtgtttttatttgtttaatttctagtaaatgagcaatattttagaaacagtatcagtctttactgacagatgatcttgctgagtacaatcaaaataaatacataaaaaattctaagcatgtggcattgatgtttaataagtttctgaaagtaggaatctgaattttaactgtaggtttctaagttatataatttagttgtgtttcaaaaaatccaccaataaaatgtcagctttataaaaacagaaa

SEQ ID NO: 279 - DNA, 38002 bp, Homo sapiens
ttcttaaccctttccagctttcccaccctctttggctttagccatggccttctgatctgtgtttctcaggggacctgcaggccccagatatagccccatgctgtcctcctaccccagagcacactgttcaggctacttccactggtactgaaatccagtatttcacttactctttttctttccaatatcctcatgacattcaatatttcacttactctaggtcctccctgcctaaggcccaagtcaactttctgtccagtgggatttgtaatccaatacctcctagccctagcagaatcccatgtggataatcagaaatgtgactggaaaaaggacagagctctatggctgtgggtcccagtccccactgctggcagtaagtccccagcagtgagctgtgtaagcaccttacattctgcgcttggttgaaaacagcaaggcaagcatccacttgagaaatgtcaacccctaggaaatcccagcctcaagtctttctcatcccttgggaagtgcaaattggatagagaagaaaccaattaaaaacaaaacaaacaaatcatacttagatattctggcttttctcaccagggctggattaaagcatgtacttcaaaataataacaacttaagtcaataaataaatgtaaggaagtccaaatgttcacctgaagacaactgtggtcattttttggcaatcccaggttctcttttctacctgtttgctcaatcgtggtctccctctccctctcttgttggggcccatgcccctgctttactgttgccagaggcttgtacttgtttgccttttaggtaggagcagttacttccactcccctcacctgccataaagcatctttataaacaaagcaagtagaagaaacacatcctggtatccaccacattcggcttttgttgattctgttcacttgggagcacctgctgctagggaataagaaggttgaggctgaagagtgaggactcttcagctcccctctggcaggacccgggagaggaaagagccctcagctggtccatcctccccactcctggtcagccttctgttctgagatcaaagtggtggggtcacattctcgagaactgtgctcagccccctcatctcacaccctttccctctccctgtgtgcctgcccccctcttacataaccatgctggtgattggcaccgtcataaatcaatactttgctcactttcacatcaagtaacactatccagggaggtggtttcaacaaaggaggaagtataaggagatctaggttcaaattaatgttgcccctagtggtaaaggacagagaccctcagactgatgaaatgcactcagaattacttagacaaagcggatatttgccactctcttccccttttcctgtgtttttgtagtgaagagacctgaaagaaaaaagtagggagaacataatgagaacaaatacggtaatctcttcatttgctagttcaagtgctggacttgggacttaggaggggcaatggagccgcttagtgcctacatctgacttggactgaaatataggtgagagacaagattgtctcatatccggggaaatcataacctatgactaggacgggaagaggaagcactgcctttacttcagtgggaatctcggcctcagcctgcaagccaagtgttcacagtgagaaaagcaagagaataagctaatactcctgtcctgaacaaggcagcggctccttggtaaagctactccttgatcgatcctttgcaccggattgttcaaagtggaccccaggggagaagtcggagcaaagaacttaccaccaagcaggtatggtttttctttctttctcttttgctgggggctgaccgcccttcagctccagccaaaagatgtgtgtgaacacaaatataccttctgtttgaggtcagcatcatagtgggtcgtgaatcatgttggccttgctgctgtctcctcatttctagggtggaaaaaaaaaagcatgaaaacaatcacttaatgttgagccccattactgatgctctctggtcctgcactagcctcctagaaaaatcaccacaggagaagccttaactactgcatgagttaccacaagtcacacatacaaccagctccctgttacagggctggagtccctggacccaggaaataccacctccaaggactgtgggagctggggactatgggaactgggatcaactcagtcctgattccttttggcctgctgggttagtgctggcagccccctgaggccaaggacagcagcatgacagtcaccaggactcaccacttcaaggaggggtccctcagagcacctgccatacccctgcacagtgctgcggctgagttggcttcaaaccagtgagttttctacctctactattgaaagggcaccttgtcccacagaaccgagtcttgcctgcatgtggtcagtgccaccaggtccttcttctctccactttacagcccagctcggctgaagctatggccagaggcactgctttaaggccactccatatctaggacaggtcaacagacacctctgaggccactgagtcttgactcaatgaatcagctatagcaggcactattcctctcccacatggcctctaatgatatggtcagagttgaaaggatgctaagggaggcctcagaggcttatttaatcagttggttaatgggaaaaagtattttgtggtacacaaatacgctttaaaaatattttagttatgtcataaaagtctaaacctggggttgacaaactatggctcacaggctaactctggcccaccagctgtttttataaatgaagctttattggaacacagccatgcccattcgttatgtattgtatatggctgtttttgccctacaacatcctttcaactctggccatatcattagaggccatgtgggagaggaatagtgcctgctatagctgattcattgagtcagcaaaattgaccaattgcgaaagagacagtatggcccacaaagcctaaaatattaactatctggcctttaacagaaaaagtttgccaactcctgatctaaaagctgtcaacttgttccaaaattattatggaataaacccaagacaaccacaaaactgactagactaggttttttaggtaataactttttaaattataaagtaatacatgatttcatgctccttgaaaatgagaaagcagtatagataaacctaaattcacctttggccattctgtcaatcctaatctccagtttccccaaaagtacttagtgtgatatatttactgccagaccattgtgtctgtgtgtgtgttcatctatgcatagatggactattaaacctatctgttgccatgttgttctaattctgtttttccactcaatagcaagacttggagactttccatatctgtatagagctctacttcatttattttaactgctacgtcatatttcacagtgtacacttcttttatttagccgttttcttttcgatagatatttaagcttttccaatttttcagtcttaccaatgaacctcactgtgtttgtctgcttctagacatgtgcacgtattgcactagaggaactactaagacgttgaattgccacatcacaggatatatgtggttcaatttttggctgccaaacagccctccacagtacccgaaccgactgtactcccaccagcagagaaggatagttactgttcctccacactccaaacaatgcttgctgtttattcagtattttattattttttccattgaattagtgcaaatgacaacccattatttcaatattttaatttccctgattattaatgaagttgagcattctttttataggacccctcttggccattgtatttctcttcttaaattacctattcatatccttagcttattttatgtcggattttttttcttctttgtaggagttttttatttattctcaatgcaaattatttgatatgtgtgtaatattctctctaagctttgtttaaatcatactttttagccaacagaaatttttactattattgttgttgttattttgatgtagttgaatctgttagtttccctctttctggattttactctttgaggctgatttttaaaagatttctcaacttccaaaattatgaagctactttggtgcaccttcctgtaatacttttatttaaaaagttagtctttattcacctggcacttattgcaatacattatttcaatactatttattgaaaagtccatctttttcctatttgtttgaaatatcacctctatcatgtactaaattcccacttacacatgtccatttctgtgtccttttgtatttatttcctattcctgagccaatttccactataatgtttaccttttctacttgattttttcccccaataaatagaaaatctattttgtgttttgatattttgcctagttaccttatggaattctcttaatagttataaaagcttatcagttgattcctttggaatttctagttagacaaacatatcatctatatatagtaagagttttgctccttcctttccaatctttacaaaccttaattttttgtgtcttattggtttttctttgccattcagcataatgctgagtagtagccatgaaagtagatagtctcagaagtgatgcatacagttgtgtgggttctatactgcacaattctaggagatactctttacaaacacttagatgtcctaggaattcttgtcatgttcctgatttccatttttattttgtactatgaactcatttggaaacttctctttgggacttgttgagattgaaattgttttcctctagaggatttatttttgcttttgccaggaacctgaggacagaactaactgggaccaccataagcttggggtctactggccacacaaatagtgagaatcctgacccaaacttacttgattgcaggcctgttgttaagaatttcaaaggagacttttctttttgctctacccagagccaaggctgagaaggcctgggatagacctgtctccctccatggtttctactgaggatgtcacccttaggggatcttgagtttatagtctatgatctggttaggctccaggctttgtctcctattctaccattaaaatccaggccccaggcctacaggagtccagaaaactccaggatgatcatgacttccctttctcatgcctctggcttagcataatcttataaattttggcctcttgagacttcctttactttcctaccagctcaatcctgcatgaaaaatgacattcttaaaaatttagtatttctaggtgctgcataccaggaggattttctgtaaccaacttctccatcatagtgccagcaataaaatctttattttttattttaatgagattgattctaatgcttctccaataagatagctagtaaaagtgtttagtaactattccatatcaagttagtgaagctctcttctattcctcttggttaaccaagaattttaaatcatgaatgaatattgagttttattaaatgctgttaagcattgattaatttccttatcatatctccatagttaattatatagctcatcccaagggtgatagaagcagagatgatccaatagccactaggacccttggaatgcagacccatgatttttccattaaaaagaacaataaattcagggaacgtggacaacattaattcaaattcttagtgtggttgccacgttctgtttgttgagccatcagactcttgccctcacacttcagatattggtgtcctgggcacaacctggggaggacaggaggaatgtgtagggaacctctcttgcatacaggggctttttaggtggcacaatttgaagggggctgggaaaagttccctgcaacacctcctgaacctctttgaaacatcgatataacaaactgaatatccaactggaaattgacataaagagacatatccaaatccctcatgtaatgtttgaaataattttcctggatctgtgtaagttccaaagagtcaaactataaaaccacaggcaacactggcactacacatgcattgataagacataggcagttaactcagaggccactgtgtcctgttaaatattggaagagggtactgtgtgtacttatgacctgggctggtgccagctctcaaccctgatctgtgtctagtaaccttctgacctcttggatctgatgaccaagtcccaggaagcataaaggccaattttcatttatggccccctgaagagagcagctgacttctctttcttgaattcataaaccgtgactttggctatctgagtttcctctggaggcctgccccatgccagggccagtgaggaggttttgttaataatacttgatttgtttcataaagaatttaaaacatatagcctcattttgcccccatgaattctgtgaaaaaacaacttgcatcatgtatctatttacatgacaggaagaatcagaataagggaaaagaaaagatgttctggccaggcatggtggatcatgcctgtaatcccagcaccttgggaggccgaggcaggtggatcacttgaggtcaggagtttaagaccagcctggccaaaatggcgaaaacccgtctctactaaaaatacaaaaataatccaggtgtggtggcacacacctgtaattccagctacttgggaggctgaggcacgagaatcatttgaacccagaaggtggaggttgcagtgagcagagatcataccatggcacttcaacctaggggacagagtgagactgcctccaaaaaaaaaaaaaaagttccgtcattaattgacttcatgaactggaacacaccccagagccccagtttcctcatttgcaaaagggataataagaactgccctgcccccgactcccttattcaacttgggataagccctgccctgccttcctcacaggcaccttgacatgaagttgtaattttgaaatcattttgtaaacagcaaaacttgtgcaaatgtgagttaaattcaccaaacgtctcccttcactgaacaacgtcaatggttttataggcatcacttgcctgcatcttagaaattcagtattcttatattacattccccttacttgcttttttctctttatcctctggccagttctgctattaatatgtgtgtgtgtgtgtgtgtgtgtgtgtgtgtgtgtgtgtgtgtgtgtgtggtgtgtatgtgtatcttggagatagtaggatgattatatatatatttaattatgcgtgtgtgtatatatatgtgtgtatacacacataattaaatatatgtaatcgtgtgtatgtatatgtatgtatacacacacacataattaaatataatcctgctatctccaagagtttctatcccaaagattatgatttttgtttttttatccatttacccccttttacttagactctgttgcttcaaattcaagttgcccactcttctcttcccataatctcagtgacctggttccaaagcttgtgctttgactcatttgaagactaaatttatctgtatgtcctccccacatccttttcctgggaaggaactatctcaccctcaaagtacattgactttttaaaaaattattattattattactttaagagacagggtcttgctgtgtcacctaggctggagagcagtggtatgatcatggctcactgcagtctcgaactcctgggctcaagtgatcctcccgcctcagccccccagagagctgggactacaggtgtgtgccaccatgcccagacacttttaaaatttatttttggtagagacaaagtctcatgttgttgcccaggttcatctgaaattcctggcctcaagtgatcctcctgcctcagcccccctaagcattgggattacaggtgtgagccaccatccctggccatcattatacaaatttatttatttattttcatttgattgagacaaggtgtcattctcttgcccaggctgcagtgcagtgggacaatcatggctcactgtagccttgacctcctgggctcaagtgttcttcctgcctcagcctcccaagtagctgggactacaggcacatgtcaccacacttggctaattttttatttttttgtagagatggcatctcactgtattgcccagacttgtctcgaactcctggcctcaaatgatcctcctgtttcagcttccctaagtgctgggattacaggtgtgaggcactgtgcccggcctgtatattgactttaaacaacaatttataatgtgagtcatttcacatatctctttgattatttattttatttcctagcaccataaagttgtttttattgacaagatcatcttctccatgccagtctgtttgtgtactgccaattttctgtctggttagttggatttccctgctactactgcaagtgtggactgcagacccatagcatcagctcacctgggagcttgtgagatgctgaagctcagacccaccacagacctactgaatgggaatttgcattttcataagctcctgggtgatctgtatgtacttgaaagctggagcatcactctcttagattgtaagcacaggctccaggttaccttaaacgggggcacttctgaagcaggcatgggagagaaggaaggcaaaaatctcaattgccagggccctgacctcctagagattaaaatgtagttcagaactcaggttgggatcaaatgcactttaattgacatggttatctttttcttcctgattgtagtgcttttaactactgtattagtccatgttcacattgctgataaagacatacctgagactgggtaaattacaaagaaaaaaaggttcaatggactcacagttccatgtggctggggaggcctcacaaacatggtggaaggcaaacggcatgtcttacatggtgtcaggcaagagagagaatgagaaccaagcgaaaggggtttccccttataaaaccatcagatctcatgagacttattcactgccatgagaacagtattgggggaaccgcccccatgattcaattaccttccaccaggtccctcccacatatgtagcattatgcaagctacaattccagatgagattttggtggggacacagccaaaccatatcaactattgatgttactttcctttgtttcctttctttctgctgcttctcctcctcacaacttctgtttcctcggggcccttcctgcttcacagcttccctgtcctgccttctctctgagtgcactgtggctgccatgcacagggcaggactgaggcaccccaaccagtctactattttggcttccttttcaatttaaattcaatttaaatattatttaaatatttgatcaacatttatttggtgatgttctttttttaatttgtaaaatatacagaaggagcaggattgaaaaattaattagttctggtaaaattcaaataacaaattttaccatcttaagcatttctaagtgtatagctcaataatgtgaagtatgttttcatcgttgtgcagccaatctccagaggtttttcatcttttaagatggaaactctacccattaaacaactcccattcccctcaccccacagcccctggcaaccaccattctactttctgcttccatgagcttgactactatacctcatatttgtctttctgtgactggcttatttcacttagcataatgtcctcaaggttcatccgtattgtagcatgtgttagaatttccttttttttaaggctgactcatattctattgtagtatgtcccatgttttgtttatccattcatcagttgatgaaatttgggttgcttctacattttgtctattgcgaatagtgctgctgtgaacatcagtgtacaaatatctcttcaagaccccgatttcagttctttttggatatacatccagaaatggttgctgaattatatgataattctatttcaattttctgagaaattgccatattgttatctataatggctacaccatttttacattcctaccacctgagtccaaggttcccatttgtctacagccttgccaacacttgttattttctgtttatgtgatagcggccatcctgaatataaagtgatgtttcattatggtttccctttgcatttgccttatgattaacgatgttgagtactttttcatgtgcttgttggcaagtgatgttcttttaaatgtgtactatgttctttatggtcaaaataaataatttattctgtgtaattttccaaaccacacaacttcttggaaggcatgtttaagtgttcacataataaaacagtacatttcttccttgcaaacagccctacaccacatatttttccatttctggctctgtctgccaacttcaatgggctgtcctcagggttgggttggctggagtggccctgtgtgacaggcatgtgagtgtccctgagcaccgtacagatactagtctgcattgtcaaggagtgttttaagtctccacctcagggtgatgactgctttggtaggaaaggaggcaatctaaaattcacctgatttctgattcattccaataatgttttggtgtctttgaatatggcagccccctgggcagcagtccagccagcagaccttataacttagctctgtctgtatgtctgacatccagactcactagaagaggatctaaatgggccagggaattacttgtccctgggacagagcaattacaccatccctcataggccccagaaggcctatggacctttgcttgggcaccaggagcttctctgagagcaggtttggggtgggcttggcctccagagtggcctcctcctgcaatgtcaggctagattaacatctatgagagtctcctgtacaaggagaggtgggaggctgtgaacactcctatgtaacaccatttgtccccttgtgtgattgcttcaccaatgttgacagctcatgtgacacacctgtcttcttctgatggaggaaggaagtaataccattttctatcaaaagcattctttgatcatccctgtcctaaaaaaaagttacttgatgggtctcttgtcaaaatcagtgatatggtttggatgttttatcccttccaaatctcatgttgaaatatgacctctaggccgggctcagtggctcacaactgtaatcccagcactttgggaggctgaggcgggcggatcacttgaggtcaggagtttgagaccagcctggccaacatggtgaaaccccatctctactaaaaatacaaaaattagatgtggagttcagagtggaaacaggtgtgagagggttcaacagaagaaaacatagctgccaagtgtttgagtccatcggcaagtttggactggccttagctgttgcagaaggcatggtgaactctgccttatataacatggatgctgggcacagaactgtcatctttgaccgattctgtggagtacaggacattgtggtagggtaagggactcactttctcataccatgggtacagaaaccaattatctttgaccaccgttctcaaccacataatgtgccagtcatcactggtagcaaagatttacagaatgtcaatatcattccgtgcatcctctttgggcctgtcactagccagcttcctcgcatcttcaccaggatcggagaagactatgatgagcgtgtgctgccatccatcactactgagatcctcaagtcagtggtggctcgctttgatgctggagaactaatcacccagagagaactggtctccaggcaggtgagcgacgaccttatggagcgagcagccacctttgggctcatcctggatgatgtgtctttgacacatctgaccttcaggaaggagttcacagaagcagtggaagccaaacaggtggctcagcaggatgcagagagggccagaactcactggccactgcaggggacggcctgatggagctgtgcaagctggaagctgcagaggacatcacgtaccagctctctcgctcttggaacatcaccaatctgccggcagggcagtccgtgctcctccagctgccccagtgagggcccaccctgcctgcacctccatgggccaactaggccacagccccagtgattcttaacactgccttccttctgcctccactccagaaatcactgtgaaatttcatgattggcttaaagtgaaggaaatacagataaaatcacttcagatctcaaaaaagaaaaaaaaaatttagctggacgtggtggcatgtacctgtaatcccagctactcgggaagctgaggtaggagaatcacttgaacccaggaggcagaggatatagtgagctgagatcgcgccactgccctccagagtgggtgacagaggaagactccgtctcaaaaacaaaaaacaaacaaaaaaaaagaaacgtggcctccaatgttggaggtaggcctagtgggaggtgtttggtcatgggggtggatccctcatgactggtttggtaccctcggtaatgagtgattctcactcttagttcatagaagagctggttgtttaaagagcccggcacctcctctctctcttgctccctcttgctgtgtgacatgccggctcgcacttcaccttccaccatgcttggaagcttcctgagacctcaccagaagcagatgctggtgccaagcttgtacagccttcagaagcacgagccaaacaaacctcttttcttcataaattacccagcctcagattcctttgtagcaatacaaaatggactaacacaatcagatctcactgtaactctggaaacttgctgcccacccattctcttctagccaaagtccactttttcccctccagagttaccacaaggaaaatgaacagcctcaatccttaccactcaggcaagattaaagagttacagtgcagcagagaggcaggacaggaccaccgtgggccaagcgatcccaactctgcccaatcagtggaggctgccttctggaggctgtaggggaggatcagtttcctcacctcttccagcttctagatgccgtggcaatccttggctcacagccccttcttccatcttcaaagccagcaacttagcatctgaccctttttccacattacgtctctttctctgatcaaacccaggaaagcttttctaattttaagattcatgtgattagactaggcctgcctggataattcagcacactccccatctccaggttctgtaccctcatcacatctgcagagacccttttgccatataaggaaacatattcacatgttctggggataagggtgcagacatctttgagggcctttattctatctaccataaggacacgatcaaaaacattatagaggcatgccaggcaattaattaatgaaagtgttatgacatttttctgaattctgtgatgttgttacttgtcctttttaatgtctgtcatttgttgtgatttcttttctcattctttcttacaaatattctcttcggtacataattttgtatttgtaattgcgtgttttttaaaattattttttagacagggtctcactctgtcacccaggctggaatgcagtggcacaatcctagctcaccacagccttgaattcctgggctcaggcaatcctcccacctcagcctcccaagtagctaggactacaggcatgcaccaacatgcctggctgagtttttttgtttgtttgtttttttggggtgtttttttttgagatagagtctcactctgttgcccagactggagttgtgtgaacatggctcactgcagcctcgacctcctgggctcacgtaatcttttcatctcagcctcctgagtagctgggaccacaggtacgtgccaccacacttggctaatttttaaatttttttgtagagacaggatctcaccatgtcacccaggcatgtctcgaactcctgggctcaagtgatcctcccactttggcctcccaaagtgctgagattataggtgtgagccactcacccagcctttttttttttttttttaagagatagggtcttgctatattgtccaggctggtctcatactcctcacaattgatccttccacctcagcctcccaaagtgctgacattagaggcatgagcccccacacctggcctatattcttttttcttaaataggactgcccaggccaagcgccatggttcatgcctgtaatcccagcattttggttggccaaggcagatggatcacctgaggtcaggagttcaagattagcctggccaacatggtgaaaaacctgtctctactgaaaatacaaaattaatctggtgtagtggcccatgccttgcggtcccagctacttgggaggctgagccaggagaattgcttgaacccaggaggcacaggttgcagtgtgccaagatcgtgcctttgcactccagcctgagtgacaagattgaaactctgtctcaaaataagtaaattaaattaaataatgtaaaataaaataaaataggactgcccaaattgtgtaagcctcagaacccacgtaagctgactaaagggcacctctacttgcccattgactaacctgaacaccagatgaaattgctcttccaaacaccactagctggggagttggctcttggctggggttggtcagtgcacaggccagtaagggagctgggcaagtgcagaagtggagactagctgtgtcccagacagcgactctccggctgtgaccctggagagtcctttagcagggcaaagtgcaacataggcagaccttaagggatgactcagtaacagataagctttgtgtgcctgcagggggatgggaagagggtggggcaggagagggacataaaagggctctgaggcattgtactgtgaattccttcagtctcctgctctgctcagccagtcagccctgcctcccttgtttaggaccacacagcactgctgggtgtctgcctttccttgtgactcttctctagcctctgcatggccagcagccctcttcttttctcctattctcttaagaaacatgcccatcacctgcagtttctctgggctccccgttaatctgccttcctcatctcctaatgctgcctcctccctcccattgccggtgcctggaaatagtcaaggctgggttctgttcttttgcttgaatttctttcacttggcttcttgactctttctaaactacaatccccccattctcactgccttagttttccctctctctgtgtttctcaaactatatcccaccacgccctgacaagggcttctctcctgtagatcatcccttttctagtattttgctagaaatatatagtgggattttctcctttgccctacatcatcactaaacttcccaacctaataggcagtgtcttgcaccttctactgatcatttcattctttcttgcactaaagatgaccacttcccatgtctgtacccaattcctgtttggcccaaatgtatctgcagcactcacccgtgttctcacactgagtctctaaatatttgactccaaaggtcactagtggatcacctccctgcctctcactttcccccaaggcacaaagtcttctcccagcacttctctttagtcctcctcttcctcatgtttcttctgtagggggaggaccatgttcaactttgtgatttttttctagtttgtagttgtgatctaccctgtaccactgagtcatctcaaatcacttaaacactcacaccaagtgtaccgcacttcacggcttaatcccctgttgatcagaaaaccccaggtccctggaattgaagcagggtctcattcagcctgacatgacctgaaatttctccctgactcctttcccagccccaagacaggggacttgcaagagtcccattgttgagcctccttggaacccactgtcttccattggtcatgttccacccagcaggttctatctagttctaatcctcaatgctgcttcgcatcccttccttgctccattgtccagccctgagctcactcaagccttgtactgctctccccttttcccttccctcccaaccctattcctctcctctctacatactcctgggagccttgctccttctgtagcagaaacttcacacacattttctttcaaattctcctccattgctatctccagttgcaccgctcttcttcatttctttccctccacattcaaacttgtcttctctggagggcatgctctcctgggggctccccctggcccagcctcagcatggcatctgcctttctggttccttcccaccttctctctcctcacttcttgccctgccagatctgtctatggcaacagcccctgcagcagtgcactctcctcttcctcttcatgcccaaagccatgtcagcctctctcagcagcttccattttattgtagagacactaagcatagagaagttagtgagtaaagtgagttagttcaacatcagtggcaagggctaggacatggcctcctgactatgacaacaagacaatgcccactatatctccagccgccaggagcaaaaaacaaagtcctctgacctccaggaggctgccggctagctgggtcctgtttggtcacaatcagtcattcccatgtttatgtgtgtgtcattcatggaagacctcccttctccctttaataggggatttggggcctcttagcaaatgaagtaactgcacaaagatatgtgtgtgtgtgtgtgtgtgtgtgtgtgtgtccccttctcattcttatgaagtcctaatgctcctccattacccccaaacaaacacaggggatcttatactgaaaatcagcattcacagaaaggaaatggcctcatgaggaagcagcaggaacaatctgtttatgggagagctcagtgggccaggcaggaggtgtcatggcccttcctctgcgtctaccatacctccttcttcaagctgtttaggtggtgctctggggtgtcagcctccaggcattcagctatcggactcttactctaaagaggaaagggaaaactgaggaaatacagacaattatagaggagaaaatgaaaataattccaaccccaaattcatcactatttcaattctatatatatacatatctacacacacagatacatacatacatatctctaaaagatagcatatacaggacattattattattgtagttttaaaccttcaatattgttttatatgcacccacatatttaccctttttagttctccatattccctcctgaagttccatgctccccactggcttttgccaggataactttctttggtattacttgtaatgcaagtatctgctggcaacaaattcttcagtctttgtctgaaaatgtctttattttgcctttacaatagaaggataattaaactattggtcaaattcttggatagcaataaagatattaaccattgtcttttctgttttacaatttcaactgaaaagtcaaccattaatcttaattttatttctttgtggttaattttttttttctgggtatttgtaagattagttttcttgtcatcgattcccagcaattttacgatgtgtgggtaggtatgtgtgtttttaatcctttcattggtttcaaaaacttcttggcaagtgtgctttcccagattgcttctgtccgattcttgtgtccgtaacatatgttaggctatttcactgagtctcgtgtgtctcttacgccctgttcttttcttaatgctcttttttgtttgtttctgtgcttcggtttatatattttctgttgacctaattttgaactcactatcactgtctgttgctgattcaatctgttgttaaaacatccaatgagttgtcagtttcagatattgtactattaatttctggaatgtccagaaatgtccagttgattatttttaaaaatagcattattgagagataccttatgtatcataaagtctaatcatttaagtgaacaattgaataactgttagtatatttagagttgtgcagctatcatcaaaatctaattccaggacatttctatgctccaaaaagtactcgggaggctgaggcaggagaatggcgtgaacccggggggcggagcttgcagtgagccaagatcgcgccactgcactccagcctgggcgacaaagagagactccgtctcaaaaaaaaaaaaaaagaaaaagaaagaaagaaaaagaaacctcatgttcatttgcagccactctctattccactctcagccacaggcaaccacgaatctactttctctatggatttgcctttcctggacatttaatataagcggaactatacaaaatgcggtctttgggtatacttctttcacttagaatgttttcaaggttcatctgtgctgtagcatctatccttcattcttttaaaccgctgaatagaatttcattgtatattagtattccaggtgcattccacattttattgatccacgaaccggttgatgaatatgtgggtcgggttttgggctattatgaataatgctgctatgaacatttgtgtgcagtttttgtgtgtgggcataggttttcatttctcttgggtggatatgtagaagtggaattgctgagttatggtgaatgtgtttaacattttaggtaactgagcaattgttttcttaagtggctgcaccattttacactcctgctagcagtgcataagggctcagtttctccacattattgccgattcttacctctttttgatttgtagccattcttgtgtattgtaagatgtatttctttgtggtttcaatttgccttgctctaataatcaatattcttgagtatattttcacatgtttattggtcattcatagcttctttggtgaaatatctattttaatcttttgttcatttttaaattgggttatttgtatttatattattgagttgtaagagttcttcatatattctggatacaagtcccttatgggatatgtgatttttaaaatattttctgtctgtgtcttatctttctactttcttaatagtgtagaaagcacaaacattttcaatttcaatgaagttcaatttatcaacttttttgtgccatattttttctgattaaaaaacaaacaaacacaaacaaaaaaaaacttttaaaagacaggaatagaataagtcttccgaatgtaatatgacaatctgtcttaccaaccaccagtaatatgctttataaggaaaactaggctgggtgtggtggttcatgcctctaattccagcattttgggaggctgaggggcatggatcacctaaggtcaggaatttgagaccagcctggccaacatggtgaaaccccgtctctactaaaaatacaaaaattagctgggcgtggtggcaggcacctgtaatcccagctactcaggaggctgaggcaggagaatcgcttgaacctgggaggcagaggttgtgcaccactgcactccagcctgcgtgatgagactttgtctcaaaaaacaaacaaacaaacaaacaaacacacacacacacacacacacacaaagacatataatacccgaagccttcacgcttttggtgtcacatctaagaaatctttccctaaccataagaacttattcctgttttcttctcagagttttatagttatagctcttacatttaggtctatgattttgtgatccattttgagtaaatttttgtgtatggcacgagataagagctttaattcatcttgcatgtgaatatccaattttccaagcacctttttttagcaaagctggcctttcctccattgaattgccttgcatttttaccagagatcaattaatgataatagtaagggtttatttcttgaatctcaattatgacccatcaatctctatatctgtctttatactaatgccacattatcttggttattttagctttgttgtaagttttgaaatcaaaaagtgtaagtcctccaactttgttattctcttccaacattattttggctattatgggtcttttacttttccatagatcacagttctcctttgaagcttttcttgccttcatccctttgtctatattatcttccatttatttttcattaatcatagggtgttttttggtcgtttttttcccctttttgtggagaatgcggtcttgctgtattacccaggcaggtcttgaactcctgggctcaagcccttcagagcgtataggacaagatgcctctggatgtggtcagagtggcagtaaggttcctcggtccattcttctatagctggaattgaaatggcaagaaaaggagtgagggtcttagggaatcacttcctgcctgggaacagagagctacattaaaggagtcccatggcatggagggaccctgtctggggtgaaccacctaggaaaaagtttgcaggcaatcatggaaatgaagaaagtttaataaacggtttacccactcaaagacaaaccttgtgaaggatgcagcatagcactgaattaagaacacaggttttggagtcagactgacatgggttgagattctggctccacctcctcccagctaaataatgtcaatgaatcactcacctgaagaggagaggggctgtgtgtgctcagtgcagcctgacagtgccttcagcaaactgacaattttagtcacgtagaaagactaaattcattgatttattcactcatttattaaataaatgaattatattcttcctttctgagaacgtagtccttagctttaatacttaccctgcataccggattttacaattaattatctttgcaaagccctctctgaagaagtgtttactttcactcagtacaggagatgatcctttcaaccttcttctgatgagatttcaccgattactaagcaccgtgagaagcaggtggagccctcagaagcaaacacagttgtattcagttaaaagtacacatctaattggtctccctaaatttgcatgaaagagagatgtagctggcacacctcagacacccagtcactgtcattttcctgcccagagggcaacattctgtaaaggaacagtgatggaagagtggcatgggagcaggactgcagctgctgggctggctcccccatcaccacagttcagatctatttctaacccaactccaggggttccacttccattatttcttgccgtgtaacaaatctcccctaaactcactggattaaacccaccactgtttcattttctgacatgattttctgtgttggctgggctcagctggggagttcttctgcatcacaggaccttggccaaggctgcagtcacctggaggcataattgggctggggagtccaagagggctcactcacacatctgctgtttggtgagggcggccgggaggctggggtggctggtcctgtctcatcggtgcgatctcaggcctctccctcttcacatggcctctccgcatggtctctttgggtggtcactgagcagggtagccagactttgttgcatggtggcttagggctctccaaagacaaaagcagaagctaccaggcttcttatagcgtagacccagaattgtctcttccccacattctattaactaagcaagtcacagaccatcctagactcattatgggagggggctgcacaagggtgtgaatctttcggggcatggctcctgggggccaccttggataacagctgtaatgggttctctagcgggggcttcataagcatatgagagaaggaactatagaatgtgccagagtcggcttgcttaacacttgggcaaaacaaaatgaaagttatacaaatactgcggaatgagattctagcattaattctactatctcctcattaagaaattggggaaagtgtaaattagacatgatttaagtaaatgtcttttttctggtcctttggtgatatttcttttatcttcttggtccatgtcacctgtgggcttctcctgtgattcatgtagtcatgttgtacttgtcacttccattatggggaagagcatttatatttattgcgagaaagcagcatctcaccatcttcaattgtccaaagttcacaattgatgtgcagaatctttgccaactgtctccattgccccaggtgctgctatccctcatggctcctgaatgatgctgaaaatgtaagggaggttggtctcttctaatgtacactctgaaatactatcctgctaataacattttctctgcctgcctgtgatgctctttgattttggaacactctttgtgtctgtgaacagttagagggttatgtaaagtccctgggtttttgtcataagagtgacttccaagttatttggaatacataacagaatatatctggtgtgtagtagatgctcaacacatgtctgttgagcaatatgataaatgctatgatgattgttatgaggaataaatgagtgccatgttctgaatgtttatgtttcccccaaattcgtatgttaaaatcctcatccccagtgtgatggctttagaagatggggactttggggggtgattgggtcatgagggtagaaccctcatgattgagttagtgtcctcatgaatgagaccccagaggccgggtgtggtggctcatgcctgtaatcccagcactttgggagtctgaggcaggtgatcacttgagcccagaagttgcagacaagcctgggcaatatggggaaaccctgcctctactaaaaatgaaaaaaaaaaagtagctgggtatggtggcatgcacctgtagtcccaggaggctgagttggaggatcgcttgagtccaggagatagaggctgcaatgagctgagatcacaccactgaactccagcctgggtggcagagttttttcttttctttcttttttttttctgtctcaaaagagagagagagagagagagagagatagagaggtcccagagacccaaagagctagctggctagcccctttcactatatgaggacagagggagaaagtgccatagatgacaggaagcaggctcttaccagacattgaatctaccagtgccttaatcttggacttctcagcctccagaaccatgagagataaatttctgttgtttataagccactcagtttccgatattttgttatggcaacctgaatgcactaagacaatgagtgaccttttacaaaggacctgaataatcattattttccattttggtatctgttccatcccatattctctaatacaaaatctgtcccaaaacactaatcctgaacctaagattgctgcagctacctgctgaaaccatctttctcagtgtacttttttttttttttgagacagagtctcactgtgttgcccaggctagagtgcagtagcgtaatcttgtctccctgcaacctctgcctcccaggttcaagcgattctcatgcctcagcctcccaagtagctgggattacaggcacgcgccaccacactcagctaatttttgtatttttggtagagatggggtttctccacgttggccaggctagtcctgaattcctggcctcaagtgatccacccatctcagcctcccaaagtgctgggattacaggcgtgagccaccacatccagtcccacagtgtcttttaatatatttacatttaatggccaggcacggtggctcacgcctgtaatcccagcactttgggaggccaaggtgggcagataacgaggtcaggagatcgagaccatcctggccaacatggtgaaaccctgtctctactaaaaaaaatacaaaaaaattagccaggcgtggtggcaggcacctgtagtcccagctactcgggaggctgaggcaggagaatggcgtcaacctgggaggtggagcttgcagtgagccaagatcatgccactgcactccagcctgggtgacagagcgagactccgtctcaaaaaatatatatatacatatatatttacatttaatatatttacatttaactaccaacatagttggtatttttttttttttttttttgagacgaagttttgttcttatcgtccaggctggagtgcagtggcgcgatttcggctcactgcagcctccgcctcctgggtttgagcgattctcctggctcagtctctcaagtagctgggattataggcacccgccaccacttccggctaactttttgtatctttagtagaggtgaggttttaccatgttggccaggctggtctctaactcctaacctcaggtgatctgcctgcctctgcctcccaaagtgctgggattacaggtatgagccaccgcacccagccccatatttggtatttctaccatacatctgtgttttctattcgtctcaccctttcagtttcttaactctctaattgccttcttttgaacttttttccttccattttttcctttctattagcttccaagttatgcattctatttttggacttttaatgataaccctagacatttcaacaagcacactttactaatcaaaatctaagatttaccatctttttttcccttcaacaatacagaaccttagttactgcatccatccatattttagttgtattttgtttttcctaactcccaagatattattattattggtttatgaagtcattgtttattccgatttttacagtaaatttttattcattttcaaatctgcttggtcaattttatggtcgtttattctttgtttatgtcttcaacctctcgtactgtttatttaaacatttctgtgtttgataactcagggcattttctcatgtctaattctagaagtttttttggtttgttttgttttgttttgttttgctgactcttgctcatcatgctgtgccagtcttttcattcatgacttctgagtatttgctcatatttctttgaaattatatgtgattatttgtgcctaggtataaagtggaaagtgagttcccccaaaaaggaggatttctggccagacgcggtggctcacgcctgtaatcccagcactttgggaggctgaggcggaggctgaggcgggcagatcacttgaggtcagcagtttgagaacagcctgaccaacatggtgaaaccccatctctactgaaaatacaaaaattagctgggcatggtcgtgggtgcctgtagtcccagctactcaagaggcagaggcaggagaatcgcttgagcccgggaggcagaggttgcagtgaacttagatggagccactgcgctccagcctgggtgacagagcaagacttggtccccccctcccccccaccaaaaaaaaaagaaaagaaaagaaaaaaaaggaggatttctgttgggtgtctgggagaattaccaacccaaatgcactttaaatcttaaatcaactttttggcttgaggtttttgtgaacacctaaagtatacattttgtctgcaagcctacataaagtcaggattatgatttgaaaaatcagggattttcccctgtgcctgttcagttcaggtttccagtcaatgtattttattcacagtgtaatggagggccagggtcagagacagattaattccttatttactcttacaggtgaaactgtcagatgtcacctgtcatgatgttggaaacagaaatttatgtgttagaattttactaaagtttcgattttggcattagaaaaagcatcgtcatctgtggtggtgtctgcccttgtcagtcagtgcctagagagaattttggggatggtagtaacaggacaatcccccatttctactgaacatcctcagtgtctgttccaagtagaattcaagttatgctctcaaggtggaagttgcctggggaggacatccttgagtacagctcaattttttttctttcttttagagatgaggtctcactttatcacccaggctagagtgctctggcatgattctagctcactgcagcctcaaaccctcaggctcaagagatcctccccgctcagcttcccaagtagctgggactataggctcacaccatcgatcttggctgtttttttttattttttgtaaagatgagatctcactttgttgcccaggctggtctcagattcctgggctcaagcgatcctcttgcctcagcctcccaaagccccgggattacaggcatcagccaccatgcttagctacagctctattaataggcacaagttcttcaatattcactgagaccccagctctgctgggaccacaggccatttttcttcccatgttgtgatcttgcccaccatgcctccactttttccccatctgcctggctacttagttgaaaactctttctgctcagcctttctagctccctgtgggagcttgggccacaccccacctgaaagactatcctccctcaatgtccccagtcccagaaatcatcttgaacaagtaatctgtccatgagctgctccccattcagacctctggccaggttgtggcctcctaacctcagtccactcagctgtggcctccatgatccgacccagacagcctgctctcttttcttctcatttcttcctccctcttacccttatctttcccatgctcctgttcacatgttctactccagggctctatttttgtgtacaaaatgtcatgattacagctctctttataacaattccaacccccattccccgctttttttccccatgagaggtcagctcccgagttcacaggcccaaatgtgagtgatgcatagaagggacagagtgtttcctctgaggcctctacacatccctgtccagtcttttcattctctgtggttttctcatttctagtccaagaggcccagaagcaaacctggaggtgagacccaaagaaagctggaaccatgctgactttgtacactgtgaggacacagagtctgttcctggaaagcccagtgtcaacgcagatgaggaagtcggaggtccccaaatctgccgtgtatgtggggacaaggccactggctatcacttcaatgtcatgacatgtgaaggatgcaagggctttttcaggtagagttacccatcagccttcacccacgtgccaccactgacccactgggtaacgtctcagggcctcagcttgacctgtcccccaggttcagagtgtgggctggtggcccacccaaaggccttgtaattagtctcaagggagccatttatatcccagaggaatccttcatcttcagtcttcctgttctacccaggaaaggtctccttccattaagatatcccttggtttctccatgtgctcttgaataaaatggaaaatgactcagtgaaagataaggaatttgaaaatcccaaatccaagtgttcacatccgccttctggggtggttgttacataaagaatggcataaaataaatgcttagaccatgggaagagaaacagaccgaagggaggggaagggcggggaggggagaaagccatgtgtgaggaagcactccaggtgcaccctccggagggcacagggtatgcaaggagcagctcccatctcgggagccacatgtgggaccctcatgcattcccaagacagccagcctgacagccctttgcagagttcttcgtggtggctgggcattcaaatggaaaagggcaggttccagggagaaatgaacattcgtgttgcatgagttataacaggggtgagacacatcagcagtgtcagactgggttcagctacaagtcacaggacacttgtcgccaattggtttggcaataaggaaaatgtgttacctctcctaacaggaagtctgaaggcctccaggttagtgagttcagcagctcatttctttccatttttctcttcagccatcccacctgagagctctgattgcagtctggctccccttgtgggggcacagtgctggggccccaggcaggaatcattatgttcagcagaagcgcacaaaggcccatctttgagagtaaggaaatctttcccaggagtcccctcacattggctagagccgggcccagcctatgcctgaactagtcactagcaaagagcagcaggtatgtccctgagctgggcacacgccacttgactgtgtggaagagggtggatgtctgcaccagctccagatgctgctggcacagaagaggctgcccaagcagtgttcgtgcatcctgcctcagcatgcaggaatcttctgctctcccttcctcatttgggtactattcctgggactctcagaaaaaggcaacatgttgtagtgggcaaaagctaaatccagtatcaggcagacctggattcaaatttcagcttgtcatgtacctggaggacagctggggatccatcgtctccaagcctcagtctccctcatctgtgctaggcagatgagattatgagtttcacagggttttagaactaaatttacaaaactgcaaaatacctagcctagcatctgatacatagcatacctttaaataatgtgagccccggtttcatcttttacccattctcagtggactttgatgtagcatcagagttttcttacccaggccagttgggaaggcaaaaggcagggatggcatctgtgaagaacatgcccctgggctggtcactggtccgaggcccgaggcctccaagctcaaacctgccaggtcactgcgggcttggctcagcttcccaggcctgccctcggggacctctgcagccctacctggctgttccatgctcctgggccagccttccctcagtttccactctggaccagaatcagaggccagagccaagggagagattgtttctttccatccagctgtggagatggggaaagtaaaggtaggactgcactgaccgtgtcttttgtgggacaggcaggacttccgggctgggaggaggagatcttgtaccagagtctccaaaaggcatctgccccattgcctctctgcgcaccgcagagaggggtgtgcgggcccgtgggtcccgcctgcacgctctgctgttccaggcgctcgacctctttgccccctaggtcaacgaggggaatccactctgccatggggaagtcgctgccccgtagggtataagaacttccccatagttcaccccttcctccctggccgcccagtctggaaggggagctggagaaggcggcggggggtggggggaaggcgggggggaaggcgggggggtggggcgggcttctctggtttcttaccctcctggggtcaggtttcctcagctccctcccttaaggaggggaaatcgaggaagaggcccatctccatggaaactttctggtaacaaggctgtgaaagagaaggggacaggtgtttcaggaagaagggaaggcgctgaggatgggcctggagaggaagtgtccctgaaagtggttttggggctgcccgcgccagcgaaaagcacgtgtcccatttcctgccggaatggccagaaaaggtctcctccccggctctgccccctctagctgagtcctggacctctagggactcccacctacacccttcccataaagcctgacccagctgggacgcaaaggctagtgtccccctccccgagtcggtaggggctggggagggaggtggtatggcccggagccccaggccgagggcccgggcacccgtgcatccccccttctgctccccattctctcacaggagggccatgaaacgcaacgcccggctgaggtgccccttccggaagggcgcctgcgagatcacccggaagacccggcgacagtgccaggcctgccgcctgcgcaagtgcctggagagcggcatgaagaaggagagtgagcagtgggcgcgcgggcgggccggcgccggggtgcacggctctgagtaaggacgtgccgtgggtgtgggcatgcttgtgtggagatgcgcgccgagtgtgcgcgtgaacacacgtgcacatgtgagctggtgtccgtgtgcaacaggcagccacctgggggagcgcttgcagtcggccctctgggagatggagggagtcggtaatctctgccctgggatgtgtgctgggcagccctggacagggcgtgccctctgtctcccctcagttgctcctgcatcattctttttgtccccttcataattgttgtaatggtttgaaaccacatttgcgggtaggagtgtgaatctgggggagggaagcaggagccacatgggtgataggacccggggccttctaggtgctagccccatcagctgccccagacctggatctttataggggaactgtttgcagacaggtgacatgaggtgttctcattctacctatttaactttgatatatttgtgctcctaggtcactatgagattaaggctcatgcggaaaaggctaggtgtttctagtgcatatttgtctccatggaacacaaagggacccaaagctgcttctttcaaggacaagttctctaggctgctggcaggcattcttgatctctccccaccaaggacctcatagctttgttctacacacatgagtgggctccagaaatccacagaagaccctaaggctctgggctatataagaagtctctggagttgctatttcttgctaagctgtagcccagctctctagggtcttggagacccagacacctctgaagagtcttggtatataattcaccagaaaatgataattgtagatgccatttactgaacatctcttatgtaccaggaactatattaggcaccctacatgcaaggtctcatttaacagcggtgcgaggtaaacacggtttctccggatcacaaaggagaaacctggaggcaggagaggttaaggaggttgcttggggtcacaggtagtaagtggcaaagctttcatgcaaacccagcgcctttggattctgaagcccgtgctcttgccagggccccacagtgtcctcacaaactccactgcagagggcaaaacaccagcctcacctcatctctgtcctcacccaagtgtttctccagaagagcccacaggcctcttgagtccagacaggggagaattgcttgtcaccattactttctcttttgcctaacggcttctgctgccttgagagggttacacagtggctctccagggggctggaggctcaccaggggcacgtgtgcctgagccagcctcactgtccctgcagtgatcatgtccgacgaggccgtggaggagaggcgggccttgatcaagcggaagaaaagtgaacggacagggactcagccactgggagtgcaggggctgacagaggagcagcggatgatgatcagggagctgatggacgctcagatgaaaacctttgacactaccttctcccatttcaagaatttccgggtaggaggaactgcacagtgacccgaggtgtcactgccatcttcattctcacatagaaactgaggttccccaaggataagaaacttatacaaggtcacagctaatcagtggtggagggtagatttggagagctggtcctgcatctgtgctagctcctcaaagccttagtctcattcccaaaggttctgaaagtgtggtccctgggtcagcagcatcagcatgcagattttcaggtcacctcagatctcctgaatctgaagctccagggaggggcaggaccccccggtgattctgttgcaggttcaggtttgaaaaatcactgctctctcctttaaggcaggtaggaactgggtctaagcaataagtggagggaaagctaggcagttccccagtgttgctggcattcggggctttatgaggacaggatcaggacctgttgggggtgtgacttttgtgaactggtgtttcttgatcccagcacattaactatgtctgtgctctaagtgccctccttcccctttgcactgatagatatctcaagtggcccttcacagcccaaataactggattagcccagtgacctcagatctgctcttcccatccatagcaccctaaaccttctgagtctcctgagcccaacatctggaatgcttgggatgacacaccatggttgcagtcccccttaccctccattttaaccaagcagggatgtgtgtgaccattaattcatagatccccaaagcaccttcatctgatagagaacaccagagagaagaaacaaatgctgtgtgtgtatatgtgtgaggacacacgcatgcatgtgggtgtgaatgcctgcatttgtgcatcctctcgagctgcaactgtggctgtgcatgtttggctggggcctgagttgggacctgtctatgaaagcacatgctgtctctcctctgtccacctcctggcatgtgtcctagctgccaggggtgcttagcagtggctgcgagttgccagagtctctgcaggccccatcgagggaagaagctgccaagtggagccaggtccggaaagatctgtgctctttgaaggtctctctgcagctgcggggggaggatggcagtgtctggaactacaaacccccagccgacagtggcgggaaagagatcttctccctgctgccccacatggctgacatgtcaacctacatgttcaaaggcatcatcagctttgccaaagtcatctcctacttcaggtaggacatggagactgggtggttgggtgtggaaaagaactggaagtggccaggaggttcaaagggcctggggtagatcctgaatttgggggatattggtgtcagaagaccctccttttcctgtgccctttccccgggcagccagtgctgctggggagtagagcccttgctgtatggctggttagttttgtggctgtgggcctgccagtgtctctgcctcttcacctgctcaatggaagctaaaaatgcctcccctgcagggctgttctgtgaaataagaacacatccgaagaacacccagcacagagtgggcattcagatagtcttttgtactctcccttaaaggggcaggaatcacatgttgacagttccagagcaaggaatgagaggaatagaaaagataaggctgtgaaggccatggggagggcgggtggtcctcagagcccaagggtcaggtctccccagagctagatgtggaggcaacaaccatcgggcaactggggttagtgggagacatgggaacttcctggggtggcaggaaccacagccccagaatatgtgtgcagtcgtaggattagggatggtgccaggtgtatctgtccttgggtaggccaccttgccttgccaagcctggtcaagtggggctgaaacacacctgccacaagctcctggtttcttcagcaggttgagggtaggttatactctaggagcccagaggttcttctctggccctgtaggagtcatgcgtgacttatttaatggggtgatgctgacagcaggtttggaatggggttcagatggtagcaaataagcttaaaggggcagggagagaagaatacttataaatgtggacattgggagatctttggtgaaatccagtgactgacaatttaacaccagggcttcccacttgctatttctcaaggccaccaatgtcgagcacagtgacctgaggtgtcactgccatcttcattctcagatagaaactgaagttccccaaggataagaaacttgtacaaggtcacagctaatcagtggtggaggctagatttggaagtaccaaagccagctcgatgccaggtcctaagctgggcaatggggaggcacagaagaataagatcaattacatggcatttgtagctcagtgttagggatctaaaagaaggatgggcgccagtagcacagggtctgaattcccaaggccaagaggtagtgtttcctcaaaacccagagtaagcagcctccctctcaggctgtgaagcttcctccttgtaaggaatgcctccttactggggaggtgggggcccctcccaggttgggagggagtgatccctgcaggaccggaagggtatccatgtaaccataatctcagaggcttgttaagccgcctccatggttaggcctgtgcttcagcgctaggagtggggcttcaggcatctgggctgcagggaaacagtagaaatacatgtgtgcacattaaacccaacaccgacagcaggaagcaaacatccccactactggaactcaggccaaaagggcggcactttcactctggaaaggggagactgcactctggaaagacttctgagaggggcaaagacatagcatggcctgaggggctagcaggatatactaaaggggaagtcattccaagggggaaactgaggcagaaaggaggaggccagggaccagaagccaaagcactagctgtaggtcaggatttgtataggagctgaaggagatggggccagcctgtaagggacctggatgccaagctcagtgggtggagttcccggaggttggaggggaggagaggatgctgcggggcagagctgtctgctgggttgtgaggggagagatgagaggcagccagacagcagccacagtcatcctcagggaaaggagccatcctccctcttcctctcgcccccaacttctggattatgggatggctgctggtgccggtctgtgggctgcctcccagggagctgtcctcccctccccatccttgctgccagggacttgcccatcgaggaccagatctccctgctgaagggggccgctttcgagctgtgtcaactgagattcaacacagtgttcaatgcggagactggaacctgggagtgtggccggctgtcctactgcttggaagacactgcaggtgcccgagagagcctgcctgccctggcagagggagggaaacactgcagttatgggaggaagggagctacgccaggatatgcaggttctgggatggcagggcaggaagatggaatggtggaaaacaagatattggtgagggatgattagatcttggtcagcttgctgagaagctgcccctccatcctgttaccatccacaggtggcttccagcaacttctactggagcccatgctgaaattccactacatgctgaagaagctgcagctgcatgaggaggagtatgtgctgatgcaggccatctccctcttctccccaggtgaggatctcccctaggctgcctgacatcccccccagccttatctgccctccccagggaaggtcccagtctatggccttgctcctcattcactgcgcagccaggatgggggctctcgctggtttctcctggggtcagtgggtgatgcccagccctggtcttccttcacttccctgcctgggtgactccagctctggagggtggttggcgagcaatgccctgactctgggctggactgagcttgtctttgccccatgatcttgcaccacacctccctcccctccagaccgcccaggtgtgctgcagcaccgcgtggtggaccagctgcaggagcaattcgccattactctgaagtcctacattgaatgcaatcggccccagcctgctcataggtgagcacagcagggggtgaggacccgtgagggtgatgtgagggagccgaggttcagggaaattgcccaagacttcatggccagagggtggcatctggaggtagccccagccagaccaggtccaaagctcacacttttgagcactacctaaccacttcccaggaaaaacacaagcaaacagggggacgtggcccagaaaggggcttctataccttcactggtcctcagtagctcctgtgacctactgcccagactgatgcccacagacccagagacaaacttggattttacggagcccaaggccatgaagggttaaggccaacactgagtattatagtgtgaacctataaactgaaatccttatttggcctgcacagctttctttttggcttggtgtcctgggatgctgggagtggccatgtctttatttgctcaacccttccttgtatggaggcaggaggctggaagtgccaactttcttttccatcatggggatactgaggcatatggtacatctcagacactagatccaaagctagttccaggaagggattccagcctgcagcccctaacctccacaacgactctgctcagtcctggcccctggacattaacgaaggcagtgacagccccacacccccaaactggtagctgcaatatctacattttcccacggaagtctctgtgtacaaagatgcaactcccgcagctgggtgtcgtggctcacacctataatcccagcactttgagaggtcaagacaggaggatcccttggggccaggagttcaaaaccagcctaggcaacatagccagaccccaactctagaaaaattttaaaaaattagccaggtatggtggcatgtgctctagtcctagctacccaggaggctgaggctggaggtctcttgagtccaggagtttgacactgcagtgagtccatgatcgtgccatcatgctctagcctgggtgacagaacgagatcctgtccctttaaagaaaaaaaaaaaaaaaagacacagctcccatgaatgggatgggagtggggagagtattgggcaggctgttctgcctttctcatctacagggtaaaagagaagcttacggaattcagccaagccttgtctcttggctgacctgaaatgtccagagattatgcttgtgcagcctcagagcagccctgaggcttgtgggtcagggcgggctgcacccacaatcttttctctggctggcatgcaggttcttgttcctgaagatcatggctatgctcaccgagctccgcagcatcaatgctcagcacacccagcggctgctgcgcatccaggacatacacccctttgctacgcccctcatgcaggagttgttcggcatcacaggtagctgagcggctgcccttgggtgacacctccgagaggcagccagacccagagccctctgagccgccactcccgggccaagacagatggacactgccaagagccgacaatgccctgctggcctgtctccctagggaattcctgctatgacagctggctagcattcctcaggaaggacatgggtgccccccacccccagttcagtctgtagggagtgaagccacagactcttacgtggagagtgcactgacctgtaggtcaggaccatcagagaggcaaggttgccctttccttttaaaaggccctgtggtctggggagaaatccctcagatcccactaaagtgtcaaggtgtggaagggaccaagcgaccaaggatgggccatctggggtctatgcccacatacccacgtttgttcgcttcctgagtcttttcattgctacctctaatagtcctgtctcccacttcccactcgttcccctcctcttccgagctgctttgtgggctccaggcctgtactcatcggcaggcgcatgagtatctgtgggagtcctctagagagatgagaagccaggaggcctgcaccaaatgtcagaagcttggcatgacctcattccggccacatcattctgtgtctctgcatccatttgaacacattattaagcaccgataataggtagcctgctgtggggtatacagcattgactcagatatagatcctgagctcacagagtttatagttaaaaaaacaaacagaaacacaaacgatttggatcaaaaggagaaatgataagtgacaaaagcagcacaaggaatttccctgtgtggatgctgagctgtgatggcgggcactgggtacccaagtgaaggttcccaaggacatgagtctgtaggagcaagggcacaaactgcagctgtgagtgcgtgtgtgtgatttggtgtaggtaggtctgtttgccacttgatggggcctgggtttgttcctggggctggaatgctgggtatgctctgtgacaaggctacgctgacaatcagttaaacacaccggagaagaaccatttacatgcaccttatatttctgtgtacacatctattctcaaagctaaagggtatgaaagtgcctgccttgtttatagccacttgtgagtaaaaatttttttgcattttcacaaattatactttatataaggcattccacacctaagaactagttttgggaaatgtagccctgggtttaatgtcaaatcaaggcaaaaggaattaaataatgtacttttggcta

SEQ ID NO: 280 - DNA, 198809 bp, Homo sapiens
ggacggcctgggaaggcttcggctcctcggctgcggctccagcccggacggcgccgcgcaactttgccatccttctggcccagccccggctacaggaggaccccgcgggcaacgcgcggagttcctggcacttcccggcggtgtctcttgttgtctgcccggggaccgacttcgcatgctctcaggctgacctgtccaagcccgaacaccgggaccatgcactcagccgggactcccgggttatcctcgcgccggacaggcaactccaccagctttcaaccaggaccgccaccgccgccccggctgctgctgctgctgctgcttctcctgtcactggtaagccgcgtcccggcacagcccgctgccttcggcagggcgttgctgtcccctggtctcgcgggggctgcaggggtccctgctgaggaggccatagtgctggcgaaccgcggactccgggtgcctttcggccgtgaagtctggctggatcccctgcatgacctggtgttgcaggtgcagcccggggaccgctgcgcggtttcggtactagacaacgacgcactggcccagcgaccgggccgcctgagtcccaagcgcttcccgtgcgactttggccctggcgaggtgcgctactctcacctgggcgcgcgcagcccgtctcgggaccgcgtccggctgcagctgcgctatgacgcgcccggaggggcagtagtgctaccactggtactggaggtggaggtggtcttcacccagctggaggttgtgactcggaacttgcctctggtcgtggaagagctgctggggaccagcaatgccctggacgcgcggagcctggagttcgccttccagcccgagacagaggagtgccgcgtgggcatcctgtccggcttgggcgcgctgcctcgctatggagaactcctccactacccgcaggtccctggaggagccagagagggaggcgccccggagactctcctgatggactgcaaagctttccaggaactaggcgtgcgctatcgccacacagccgccagtcgctcaccaaacagggactggatacccatggtggtggagctgcgttcacgaggggctcctgtgggcagccctgctttgaaacgcgagcacttccaggttctggtgaggatccgaggaggggccgagaacactgcacccaagcccagtttcgtggccatgatgatgatggaggtggaccagtttgtactgacggccctgaccccagacatgctggcagccgaggatgctgagtctccctctgacctgttgatcttcaaccttacttctccattccagcctggccagggctacttggtgagcaccgatgatcgcagcctgcccctttcctccttcactcagagggatctgcggctcctgaagattgcctaccagcccccttctgaagactctgaccaggagcgcctctttgaactggaattggaggtagtggatctagaaggagcagcttcagacccttttgccttcatggtagtggtgaagcccatgaacacaatggctccggtggtcacccggaataccggtcttattctctatgagggtcagtctcggcccctcacaggccctgcaggcagtggtccgcaaaacttggtcatcagcgatgaggatgacctagaagcagtgcggctagaggtggtggctgggctccggcatggtcaccttgtcattctgggtgcttccagtggcagctctgctcccaagagctttacagtggctgagctggcagccggccaggtggtctaccagcatgatgacagagacggctcgctgagcgacaacctggtgcttcgcatggtggatggaggaggcaggcaccaggtacagtttctgttccccatcaccttagtgcctgtggatgaccagccacctgttctcaatgccaacacggggctgacactggcagagggtgaaacagtgcccatcctgcccctttccctgagtgcaactgacatggattcagatgattctctgctgctttttgtgctggagtcacccttcttaactacggggcatctgcttctccgccaaactcaccctccccatgagaagcaggaacttctcagaggcctttggaggaaggagggggcattttatgagcgaacagtgacagagtggcagcagcaggacataacagagggcaggctgttctatagacactctgggccccatagtcctgggccagtcacagaccagttcacatttagagtccaggataaccatgaccctcctaatcagtccgggctacagcggtttgtgattcgtatccatcctgtggatcgcctccctccggagctgggcagtggctgtccccttcgtatggtggtacaggaatcccagctcacaccactgaggaagaagtggctgcgctacactgacctggacacagatgaccgagaactacgttacacagtgactcagtcccccacagacacagacgaaaatcacctgccagccccactgggtaccttggtcttgactgacaacccctcagtcgtggtgacccattttacccaagcccagatcaaccatcataaaattgcttacagacccccgggtcaagaactgggcgtggctactcgagtggcccagttccagttccaggtggaagaccgagctgggaatgtggctccaggtacctttaccctttacttgcatcccgtggacaaccagccacctgagatcctcaacaccggcttcactattcaggagaagggtcaccacatcctgagtgagacagagttgcacgtgaatgatgtagacactgatgttgcccatatctctttcactctcactcaggcacccaaacatggccacatgagagtgtctggacagatcctgcatgtagggggtctcttccacttggaggacataaaacagggccgagtttcctatgcccataatggggacaagtccctgactgatagctgctccttggaagtcagtgacagacatcatgtggtgcccatcactctcagagtaaatgtccggccagtggatgatgaagtgcccatactgagccatcctactggcactctggagtcctatctagatgtcttagaaaatggggctactgaaatcactgccaatgttattaaggggaccaatgaggaaactgatgacttgatgttgactttcctcttggaagatccacctttgtatggggaaatcttggtcaatggcattccagcagagcagtttactcaaagggacatcttggagggctctgttgtatatacccacaccagtggtgagataggcctattgcctaaagcggattcttttaacctgagtctgtcagatatgtctcaagaatggagaattggtggcaatactatccaaggagttactatatgggtgaccatcctgcctgttgatagccaggccccagaaatctttgtaggtgaacagttgatagtaatggaaggtgataaaagtgttataacatcagtgcatataagtgctgaagatgtcgactccctgaatgatgacatcttgtgcactatagttattcagcctacttcaggttatgttgaaaacatttctccagcaccaggctctgagaaatcaagagcagggattgccataagtgctttcaacttgaaagatctcaggcagggccacataaactatgtccagagtgtccataaaggggtggaacctgtggaggaccgatttgtatttcgttgttctgatggcattaacttttcagagagacagttcttccccattgtaatcattcccaccaatgatgaacagccagagatgtttatgagagaatttatggtgatggaaggcatgagtctggtaattgatacacccattctcaatgctgctgatgctgatgttcccctggatgatttaactttcactattacccaattccccactcatggtcacatcatgaatcagctgataaatggcacggttttggtcgaaagcttcaccttggatcagatcatagagagttccagcattatttatgagcatgatgactccgagacccaggaagacagttttgtgattaaactaacagatgggaagcactctgtggaaaagacggtcctcattatagttatccctgttgatgatgagacgcccagaatgactatcaataatggactagaaatagaaattggggataccaagattatcaacaacaaaatattaatggcaacagatttagattcagaagacaaatctttggtttatattattcgttatgggccaggacatggcttattacagagacgaaaacctactggtgcctttgaaaatatcacactgggcatgaattttacccaggatgaagtagacagaaacttaattcagtatgtccatttggggcaagagggcattcgggacctaattaaatttgatgtgactgatggaataaatcccctcatagatcgttacttttatgtgtccatcgggagcattgacattgtcttccctgatgtgataagtaagggagtgtccttgaaagaaggtggcaaagtcactcttacaacagacctactaagcactagtgacttgaacagtcctgatgaaaacttggtttttaccatcaccagggctcccatgcgaggtcacctggaatgcacggatcagcctggtgtgtccatcacgtctttcactcagctgcaactggctggaaacaaaatctactacatccacacagctgatgatgaagtgaaaatggacagttttgagtttcaagtcaccgatggacgtaaccctgtctttcggacattccgtatctccattagcgatgtggacaataaaaagccagtggtcaccatccacaagctggttgtcagtgaaagtgaaaacaagctgattactccttttgagctcactgtcgaagacagagatactcctgacaagctcctgaaattcactatcacccaggtgcctattcatggccatctcctattcaacaataccagacctgtcatggtttttaccaagcaagacttgaatgaaaacttaatcagctacaaacatgatggcactgagtcaagtgaagatagcttctccttcacagtgactgatggcacccatacagacttctatgtttttcctgatacggtgtttgaaacaaggagaccccaagtgatgaagatccaggtcttggctgttgacaacagtgtcccccaaatcgcagtgaataagggggcctctacacttcgcactctagccactggccacttggggttcatgatcacaagcaaaatattgaaagtggaggacagagacagcttacacatttctcttagatttatcgtgacagaggcccctcaacatggatatcttctcaacctggacaaaggcaaccacagcatcactcagttcacacaaggtatgtttcatgtttcttttcttggttatccttgtttcctgagaatgtggcttcactaaaagcctcacaaacagagcattaaattagagtccaagagaaggaaaggaaacaaaggggatggggagaatatagggactcactttcctaggaggacagctcccttcttgtcctacctcccatctcagtggccttcattagagggagtactgatgtattttgaaagtggcaaggataggctgccgaagcaggaggtgaactttggtgaattaaaatcgaagcaggctttccaattctgctccatttgccatacctatccaacgcatcctctgtgttgtatgctgcaggtggttcatgaagcattttggcaccttaatgaaggatgtgctttctaaatactgtttattcacattgctgtcattatcaattaccattccaaaaaagccttcaaacttaggttactttgaataaattttaagagcattgctctgacacggttatagttgttaggaactttgtaactaaaagatttgtttacatttatttactttgttgatttttaaaattgttaataatatttcatgacaggcaaatactcatccagagacgtaattgataaacacctatctagagttataacaatgatatttacagggcatgctactaggatatacatgaaaaaggaaagtatacttaaagatgtgtaaaataacaatatgttcatcaccaaaatatacatctaattcattattaagagcatgaagataagtagacaagcttaatattagaagggggaaattatttcatcattgtgaacctcctctctgacctgttgcaaacacagtgacaaaaaacagttgcttcaggcacctgcggtctttaggcaacaggatttttctaacctgaatttcctttgtgggtggacacaatctgaggcagaaaggacaagtgtcctatgcagagttatttagtgagggaagggagaagcccattcactatactggcttgggagtcagggctccgttctgcagaacatgcaactttcattacagtgggatttgggttgctttcatgaaaatctcaccatgtcagaatggacactagatctttcctatgtgggatccatgggtagagatggagcttaaccccagggcatcccagtgggggtgttcttttcctgcaactgtgttgtactcttagataacaaatgctttaataaacatggaagtagcaaaatgcactgttaaagtggactacttctctgtttgaggtgctggcaaatagctccacactccaacctcctgattcttggctaaaagcctgaatgtctcccagggcctgcagggacaggaaaacctcaaagtgccaagtgtcatgccagaccagtaggaaacttttatgtgaaggctttctgaggctagcgatgccatgccgtcttacactggtttattttcatggagagggaagagaatgaaaggaatatattagataatagaaaatggttcttcaaattactcctctgacctgaaaaagaaatctgatttagagatttttaaaaggactattttgatgaagacaggcaaatgatttaatttaaattctgtggactaagtccaacagctcacaatattagaatattatttctgaaattttgaactctaaaaattatgctatttcattataggcagttgttctttctcttactgactttgagtcaccatgattaatttttgtcatctttgtaaatgtagagaagttatgcttattatgtgatgtgactttttaagaatttttaaggaaaattatcacattccaatataaaccaaaatattgactagggaagctgttggtattcaatcacatggcactcattcaaacaagtcaaggctagactttgatccgtagctgttatttatggagattagataagtgatttaaaaaacggagaaagcgccatcagaaagctaccatggctctttttccactaggagaaatgaaagcagtgcttaagagtgaagactatgcagtccttttatttctttttgtttttgctttatcatgaagggataaggtaaacctatattttgatggattttcaatgcattgaattaggtcagtttagcacaggtagctagagaaggttattcctaaattgattgactaaatggttcctagaagaaaaaaattaattcctttctaaaacttattaaattgatgaaaagttaacaatgtataattaggtaaattatggatatcatttatttatttcaaacttcacctctttgccaagttgcccctgttccccttaacccagatctaaattgcatgtctcaagtacctggatttttcttccctacaataagtacgtaatgatatattctgtgggataatttataagccagtttcaggaaagcagaaatgtcttcaaagagtttgaaccagatgtggctgcctgatatgttaatgaacttagaattaaaaacaaacaaacaaaaaaatctcatggaataattttgtagataaactgaaataaatttaatgtatatttaacaactagaagaaaatctagataattcttagatatttgctttaaaaagattacattttggctattagattatatttctactacttttgtgtcttaagaaagctagacgttattacatttatatatacataaatatgtaacgtgtgtttatgttatttgtagaggtgcctttagaataccagtatgatgatgaaagtctttacttactttttttagaggctcttttttgaaccatgaattattaattaattatatgaaaaatataaaaggttttagtatgttccaactaatcaataacacatgccctaacttggagggaaaattgggtaccagagtgccatatagttgcatttatgttttctttatctgaaaaaagaaaagttcttaaaattctgttttgaagtgaggatttatttcaatgaaactatcccttaacgattacaatttcgcttaagaaaacattgatacagatgctgggcatgctaaacagtgccttttctcctagtagagcctttagattttcttatgcaatttgaaggggtgggaacattggaagagggtcttctccacatggccagaggtcatggttcttgtggtaaagatgtgtagtcagcagagtttactgcatttttttactgataaagtgaaggttatacaattaagaattataacagtaaacaggcaaagagttgtgtaggggcttcagttcttaccctggcagaaacatcatacatgcaaaggtagagatacaagtgtgatctacctactcagccttttcattttaaattgagaaacatttgcgcctttgctactgtaatatcctaagcaaagagctgtgggaagttaagataggaaaaaaaaatcccagaagtttttcatctactgggaaagataaccatacagaaagataaaagtgaaactaggcagcaagtgtggaaagttatagtagagttagaaatatggggcctggctaggtggcttacacctataatcatagcactttgggaggctgatgtgggaggattgcttgaggccagcctgggcgacatagtgagacccacatatctatattttgttttaaaaaacaaatgaagtgctaagggagaatcaagcgacttaggcatgttttacctccaaatacctctattagcaggagggtaccattaactataaaatcagattttccattctgcaagtgttcctaataatgagtcacctttcaaaactttatgagccagggtagaccacacattttacatctgtaaagtggagctatagaaatttgtggcatcattggtccatcctaatgccttgcctcacttgagattaacatttcataaagccattgtcttctttataagcctttgaattccatagcatgaacttactagagcttttaggagatgaaaaaaccatagaacacacactagacagataaatattacctatcattgtcatagctatttttagccatgatcttgactttatgtagtcttagaaactcactgattggcccagatcaattaatgatctattatgagtatcacagaacaaaacgatttttttcttattatgttgtatgtgtggcatcattaaggaaaggaactggtaagatggatgaataagttttaaaaattgtgtcttcataatgaaaacaaatgtatgcatgtgaatttgataaagtaggaaacaacataaggaacatttctgaggcaatataactttctgccatgaataaaggtttccactttttttttttttttgagacagggtctcattctcttgcccaggctagagtgcagtggtgcgacctcagctcactgcaacctttgcctcccaggctcaagcaattctcctgcctcagcctcccgaatagctgggattacaggaacgcaccaccacacccagccaatttttaatagagacagggtttcaccatgttggccaggctggtcttgaactcctgacctcacataatccacctgcctcagcctcccaaagtgctgggattatacgcatgagccaccgtgtccagcccgtttccacttttattagatgttttttgttctcaacagggagtcatcagttatttcaatgtgtgtgattttttgaaaatatcatcttatttttttctctcaaactttggagagcttaaaaaatagcctgctacagcacaaaaagtaagaaaagttagccagtgttggggagcaaagctctgtcctctgcgggccagttccctactgggaggcaaaggatgtgatttcaagagtgccaggaaatctgccatgcctcaaaatatcttcctttccacctgtcatggtgcctgacattccatatttagacagtcattcctttggtgcatgaacatgcaaataccactgggaggggaaacaccttgctattattataaactaactcttgcactgtatttatctgtgtgagggatcaggtgtccatgggacagctgaaatctaggggcttagagatctgagaaataagacagcactgtttctgttaggaggaaaaaggaatttaaacatgtttataggaaaactaatagccaataaaatttaccataatgaatcatcaattttactctggtaattaatcatcttgttttttggttattttctagctgacattgatgacatgaaaatatgctatgtcttaagagaaggggctaatgccacaagtgatatgttctattttgcagttgaagatggtggtaagtattcccctctcctggtagtgaccgcaaggagagacgcttttcttggttgctctctgatgacattattacaagaagtcttcatcaagtaatatttcatgatcacctaaatttaacctggtatttgctgtagacaattttacaatctcactatgacacaatcctactatgtcatggctatagataaaagttctagttatatcacttttgtcttactatttgtaaagcactaaagagagagatctgtataaataggatctccatgtctagttgttcagattacaccctgcatgagtttgcctacttgagtcagtaagaggatgttggaattcagctgcagttccactcatagccatgtgctcactgaggtgtagctgcccaaaggagctgctttttcctgatttgctcatgggttctgtgtggactaatactgatggaaaatgtgttgcattcaccaagaaatcagtagtaaattaatgtctgttttatctcaccaatctcaggacttctaatgattttcttagtttgggggattttgtgacctagtccagctaaaaatttttcttggttaagtgtgaagaatacttcagagtataggatgtgacttctgagctaagtcttttgggcgatattattctcattactcccccagaactgcctgctgtttatactcctttcagctttggatctcttgtcttcctaaccctgtgggtgaggagaaaaactggtcactttcagattgctcataaagatgtttttgttcttgcatgttttcttttgaagcaaaagaacctcccctagtacatgtgttgtgtgaacaggacaccagaactgagggtatatgtgagagagcagagagaggaaggagaaaaataattcatactctgttatctgtttccttatgatgctttttaaaaatggcacactattatgtcgtctatctcaaaaatactgcatccttaccctccatgttttttgaagcattacatagtatttgtttaaaatatcaatggacacaacatgatcacagttctgaaaaatgtcaattgttgagtgtgtgccagagaggcaaacaaaatgtgttatgttgggttcaactgtttgattcctactatgaatcagagagtcaatcatgtgagtgcctttattttttgagtaaccaaatcatagtttagtattctacgtattgatgaaaggcatcttagcataaaacgaagttctaaaaaggaaatcaactcataaaaaaaaccttcttgaattttgctgctcaaatgggaaattctattgtaactaactgtagagtgaaaccctgaaataatccaaatctctgtaacatatataaaaatttaaggatgaaattattggtttaaaacaccatgtttatctcttaggatgactgagtaaacctcaatagcaaaagtgtgactttctgtaaaattaccaaaaaaagtttcaaattcaatggctgcaattacactaaaatattctatactttttaataaaatattttgctttttttgctcatacacaaacacacacacattattttaccttacctgggtggaatggtagcatttactttaaaattttggtctctattccaattttggaaaacattctatagtatcatatttcaaaatattaagtgcaaaatattaagtgaagaatgactagctgaaggggctcggtttatgtttgaatttgctgaaaatgtggcaaggcctccaaagattgtctttatggaagtaggaacatatcattttaggagtctttttagagagagagtttcatgtgagagataaaaatttcagattttcttttttaccctcttcctctttactggcataacattacctatggagctcaggcagattttggcaagctgttgaatagaatttactttaattcccctgatataagaaaactatcctttgacagaataaacacagagacctgcaagattaaaaagtcacattggtatccctaaattgttttaacctgattcttaaatttttttaggatttttgcattgccgtataaatcttctgacatttgaatgagaagtgcaatactgtttaaacttaattaactgtagtgatttattgtcgtctagtctatacaatgatagtaggcatatctataagtcatcccgatgaaatatgaaatgtgtgagtatttcacccctgggaagcaagtcagggcacaatggcataaaattgagaactctgtatgtccagcttgctttccaatctgataaatgcatcttcttcaaatcaacgtgattgattttataacagtaactatctaaggaaattagtggggcaaccatcatccatgaataaccttaaaaataaaacataattcaatttaagggatttagagtaggagaagagattgagaagaacagaaggctcagacctcttgtttcagatttaattgtgttaccatgggaatctggctcgccacaggattcttctgttatgatgtagtaatggattagtgactatccattactaaaaggactatgcttgggaaagggttactacctttgaagttttggagtgctttgggacttttaccaaatgacagaagtaaagagagcactatctgagcaacagataacatcagggtctttacctcaggggaagtctactgtatttggacttaatacacgttggttgatatagcacatgtccacacacatacacagatccttgtatcttagggttctttcaattagatttcaaaccttctatgttatttattgtttcttatgcgattttaccttcataacatctctgtgagcaacaaaaacagcaaaaaaaacttagtatgatttctatttggcagatgaggaaactgagtcaccaaaataagtaactttcctccttcaagctgcacagctgggcaactagaggctgctttcaatctcaaattctttcctcagtaataagcgataacttccacacttattcaggatagggataagagggggaactcttgaacttctctgggttctccagaccaactttctaggaatgtttaatagatgtgagtgaagtcagagtaggatctgcttttaggatagacaaagagctttgtgttttctaaaatgtgcatttttattttaaaatactttaaaagttgtagtgccctaaactttgtagtactctttcttggtatcatagtgtaattctctttttaaaaacctttgttttcggttcagaggtacatgtggaggtttgttatataggtaaagtcatgtcaaggggggttgttgtgctgattattttgtgacccaggtactaagtctagtacccaatagttactttcatagtgcaattcttaaaatgattattttataatgcaatatgcttattggaatattagtaaagagcatgaaaatgtgatatcagaataaggcactcacccaggtgttctgggccagtcaacatacatgaatgcatcattacaaagtataaggtcaaactctgaagttcaagaatatattcccgctgtctgcggcttcatctaatgagctcgtgtatatatgtagcaactgcctgtggatttagctgtcttccatttcttttggttttcgtgctttatatcttcacgaaggtaacttataataatacagacctgggaaatacatcttcctttgttgactgcctctttgaattgtaattccagatccagtactctggaattttgttagggagaaataaaatatttattcttttatcctctttgtagtcaaacatttttatctgattccttctcagtgttcaactctctgtaatttttctataaggtattctaacatgaaagtgctttgtcgggcccttctagctctttattgtgatgtgaaagctggtctcaaataactattccaggcatgccccaccctcaaccctaatgattgttaatcactcttcaacaccaggctcaaatatcatttcctctccaaagttgctcccaacatcacaattacataattagtctcactcttttttatgcttttctccccaactttatttacagtaaaaatttatattatgattatttgctaatgtggaaacctccattagtaaggaagaaactccttcatatcaaaaaaggtatcattaatctttgtacctcagtgccaaggctgagcacgaggtaaatacttaccgaacattaaataaatgaatggataaacaggagaaaaacaattgctctcttttgacataaagatcaattaaatagtattatatgaaaaactcctataaacaattcccagtagaccctttgcattcctttagaacgttgttctatcctagcattaatttaaatccctatggcaccaggaaagttttttagtgaagctttcacatttttaaacgcatgaaattaactaaatcaactgctgtgaaaattccttcaaaatcttcagtgaaatgtacttaagattgaagtattaaccaccagttcagagctcatattattcttaaacaagccttttcagaaaaaaaaacttgtcggtttattattaaagaattatacaatttaaaatctaaaaggaaataaccatttcctataagtcactaaaattttcaagccagcagcaccactactgtattttcagttaccccagtattttcttgtgtggtatgagataacattaggacaggtggagaagtagaagacaataccagcaaaaagtatctctagttttcattaaaaagtcctcgtgtaaacttttttgtttgtttgttttaagtctcaaagcctcagcatcagatccagcttgtttcttgatgggcttgagaaaaaattagaatacatacctcagcatcagatccagcttgtttcttgatgggcttaagaaaaaattagaatacatgatcacctggctggacatattgagtaggaggagtcttacatttgtattcattatgaaaaccagcttgctgcttccttatttgaaacctctcatatgacataggcatgcagtctcagtgagttctgcctgctgagtttggcattgaaactggggcggcagacataatatctgtgttggccattatagtgttatctgggccacagccagacatttttttgctgctgtctttgattatgcctttggtgcccaattttccatcccccaagatccttgattcatatgctattgaaggatattataaatagtatcttgacatagtagaagctgcaaagtcatttctgtatatgaaatgtcatttaaggtcaaggcttttgaattgttattccgtatttgatgattgactcctcaaacacaaagagactaccggaagcctttcatttttaatagaaggagtacaagtttttgcttgaaaatgaccaataactttggggtttaaggcaaaataattactgataattagcttgaagttaaatcaagggctggaaaaatataaatagagtaagtagaaaagagaggtctgagtacaagcattaaaagattatacagacatattcagctcagagaaaaaagcaagcattcttggcaataaaattaattgctagtgacatgagaaccagggggaaagatgctagtgccttagggagttataataagatggtgaagtaatgtcaggcactgatacaaatatttttaatctgtgagagaccacaaggtctactagaatacagatcttgggaaggagtgttggctactgtggctgaatgtttgtaagcctttcactcttcattgagcagttcacaatagatcaagtcatcagggtgtttctaggccagatccctgcctttaaaagcatgattctattaaggtacctgtactgtgtgcaagaacgaagttaaaccttttagatagaaaagtataaactcaagtttttataccttttagatagaaaagtaaaactcaattttatttattattattctttagattcattccaaaattatacattatatgaatatactgttttcattggctttagttccgagaacatttttttaaattgttaaatctttgggtgacaatgaattcttgttaggaagatttctagaaatttcacatgatttcatattactcagaacaaatgatagtcaccttttaaacactaagcatatttttcataggtgattaaagtaccataatctcaaatcaaatatttatttgtggcatatgttaataatttgatagtatctcaatctgtctctttacatttgctctgatggctgggagaagtgggaagttattttcaaaggagaagcacacagtggtaattggtattattctgtatttgccagaacctaagataatgcaacagataaccagaatgcaatgtaaaagaagggtcagagtttctatggtgaatcttattggctaaagcaagattccttgtaaatttctttatcgaattactcaacaaatatttttggagcacccactcaccatgtttcaggtgtccattggggtctgagaatacagtgatgaatattacagtcatgatctttgacctgagattcatccttaggataaagaagtagacgaatgagttaaactttgtttaaagtattctgacagttataattaagccccagatagagacacagctgtcaggaaaggcacctgaaaggtggtatttaagtatagacttaggacaggatgaagctgccactagaggaagggaagaagaaaccttccaggtggcagcaaaagcatgtgcaaagggactgagctttgtgtgttcaagtcaccagaaaagcaccagcatgcctgcagctccatgaacaaaccagagaaggtaacaagatgaggctggagagctagatcaaagcctgatggtgcagagccttgtatacccagaggagtgatttagattttgtgctaaagaaaagagtatccacctgtattagtcagttttcacagtggtctaaagaactacctgagattggctaatttgtgaagaaaaggtttaattgacccagttatgcatggctggggaggcctcaggaaacttacaatcacagcagaaaatgaaagagaagcaagtaccttcttcaaagggtagcagaggagagagtgagtgaagggaagtgccacacttttaaaccatcagatctcatgagaactcactagctatcatgagaaccgcatgggggaaccgccaccatgatccaatcacctctcaccaggtttctccctcgacacatgggaattccaattcgaaatgagatttgggtggggacacagagccaaaccatatcccaaactaaatcattttaaagaaagggagcattgtgttccaatttgtgttttagaaagatgattcttgcaggtgtagaggatctataggagggcagcaaggggaaacaggaagattgacatgaggccgatgcagaaagacagatgtcatatgggaagaataaggtaagcttgatataatgttggatccaaatctgtaagacttattgatgagttggagtgtagggtaagaaaaaaggagaccgtaagcatgattctgggttttacagccagcagagaatggtgctgccatttatggagatgaaatagactagaggggcatggactaggtttaagggaggaaattaagaggacattagaaacatattaattatgagacctcttacttctttgaaatgtgtatacaggaagccagccttttgatcttgcttatcttttcttccatcacagttagaagcgcagctttaggagtgagagctggaacaaatactgcttgtgcctcttaccgtaattggtgacgtgaccctgagccaagtgaccgagacttcctcagcctcagtttcatttataaagttgggataataacagtacctagctaatagggttctttttaagattaagtagataattcatgaaaataagatcattcatgcggcacagttcctgtcacatagtaacaactatgcaggtagctgctgctgctgtagctgctactctgagggcttccagagctatgctgttctttatttttctttctttatttcccctccctccctttcttcttttcttcctttcttcctttctcctgtctttctcacagcagctgtctatacagttagactgttcatttggtgttggtagaaagatgggggaatacacagggatggaaagtcagaacctgatgagcccttctgtagtgcaacgtttcaatgctacggaggcttccaaagttatttcacacgttgtaagtagtttaactaatattttcattacaaaaatgataacaaatgagttttcactatggccaaataacagaaatttttaaaaacccactgtatctctgaagctcagcctgcatgttttatttctcctttttaagggttgaagtgtaaactttataggcttgaagattaataccgtatcttgatttgatcaaaatataacccttcgaaacatctgggtttagcaaacatgaggttcaaagggtagttttgattgcaaatctctaatacactgagccataagtggttggagagattgattaaatgccatgtttattcagatattggaatcgcctaaatatgctttgttatatagagaatgatatagtcaccccagtggccagatgccccatttagtcaatatcatagagaaaaaagcaagtaaataaatgtacctttgagaaaactagtaaatttaggcactgagaagagcttgttttaaatttaggcattaaggaacttgaaattccttactggggtcattggaaaatgagtgttgtgtgtatgtagatactcctaacaagttccttcaaaaactcaatgttgcttatggaaacaatttgtactaaaagaatgcttcttgattttattttatgaaaatataaaatcctgctttttctgagattagaggaaaactatatgctttttagaatcttgtaattttaatatttttgtaagtaatgattgggtaatgaataaattttatttcacatctacaatcacaaacttcctacctgataagtattaaagccttgtacctttctacaatatcccaatgagttcaaaaggacaaatgtcatacttaatcctcattgcaaataaggaaaaataagattcattgaagtttaactttgtgacacagtgatgaatgcatgaatcacacacatgaataaagtataggtacttttgttcttgcttcacaaatgtggattgatttcataatgtacattttctaagagcaaaaatatttgtataaatgagaaaaaaatgtttttcttaatattctgtttcagaacagttagtgcaagtttactaagattattaatttattaatccggttctgccctttataaaaaaaattgccaagtggctgcatataagcaatgtttcactgagggaatattatgttaaagaaacagtgtaccttcagatggtttacacttagaattcttacatttttaggagagaagtttctagaatgaattattcagttatagctaattaccattagatatgattcatttttttgcagagtattagtattcttggaacaaagaaattatacaaaaagattagggaataaaattatatagctatatttggttttcaacttagaacatttttttctgcatgttaatttcatgctaagcttagaaaatagcagccttcatggtagcttttgatgaaggaagtgaggacacaattgtcctctttctattcccagagagctctgactacattactgcaggttgagagagaagcgcctgttctccatccctctgctggattttttagcacaggaaggtttaatcctttcatctttgtaatgtgccacctgctacctttaactctacttatccagctgttagaggcacgagttgagaacactgaaaacagtgtttttaagaatagttcaagagtgccacttcagaaattgaaaataaagttgtgaaactggttggtagactttagaaatccccaagaaagaaaagaaccattttgtgtccccgtaatacttctcttgctttacttgattttatgcagaaatggccaaaaattaagtgcattgcatcactgctataaaattatgaaaggtaggctacatttaatcctttaggaaattgttttctcagtttcttcttgccacctaaacctcagggtcattttgtttcaccatccgtgtccacccaggtgctaaatccaggcagctttccctggttcctgaatttctgttgagtaggattcccacacattctccatggccattggttccttcagaaccacattgaagtttatcttaaatgacgtaacagatgtaaactgcttaaaataatcataggcacaaagtaagtgctatattcatgttagccattgacccccactataatatatgctgtccatgagagccaggatttttatctctgattttcattgatataccctcagtgcctgagtacatataggtgctcgataaatatttattgagtgaaggaaaatatttcttccagtgcaattctaatggatctctttgtctctttttgccttcccctctgacctggatatagcttgtttccaaaattacctaaaaatacaaatgtgattttagaccgggcgcagtggctcatgcctgtaatcccagcatcttgggaggctaaggagggcagatcacttgaggtcaggggttcgagaccagcctggacaacatggtgaaacactgtctctactaaaaatacaaaaattagctgggcctggtagcgtgtgcctgtaatcccagctactcgggaggctgaggcaggagaatcacctgaacccgggagatggaggttgtggtgagctgagattgcgccactgcaccccagcctgggtgacagaatgagactctgtctcaataaataaataaataatctttaaaaaaagtctttcctcccttcttctgccataattttctaaactgtaaatttgatgttgtctctactttataactctcaatgttttgttttgttttgttttgagacagaatttctcttttgttgcccacgctggaatgcaatggtgcgatcttggctcactgcaacctctgcctcacaggttcaagcaattctcctgcctcagccttctgagtagctgggattacaggtgcccgccatgacgcccagataatttttgtatttttagtagagtcagggtttcatcatgttggccaggctcgtcttgaactcctgacctcaggtgatccacctgcgtttgcctcccaaagtgctgggattataggcataagccaccacatccagcctcaatgttctctcacaggataaaattcagactcttcccatgttgtacaaactgtgcaggtctgacccaatgcaaccatgctgcctactcaggattcctgcacatgccatgctacttcatgcacactcgcctttcctttcttcctcaatcccctgcccacttcctctgcatgagattcagtagagatggcacattttcttcctgacaccttctactcctatccttagggtcagacatctccgctgtgtttcccataacaactcatatttggatctcaaagctagattcaaaacatggatgtatatagcaatatattgatttatataataatttaaatcattatgccaattgtaaaatattatatatgtacatataactgtgtaaatatatagacacatacatgtatacaaatacataattgcttaccaagtgatgtatggggcagcacaaatatttaataatatataatataatgtaaaaggttgttagactattatgtagatgcatatatattatgcagaatatactacataggtatatatacctatgttatatgagaatgcttataagtgctatatcatagtacaaattgctcctcaaatcacacggataatttaaaaatcttttattttgacgtcatcttttatttaaagtggctttcacaagctgaagggtactctcctaggaccgtgatttgacacagatactgtaccaaacccttctaatgactttacccttaaactgcttattattaagtgacttgtagtcccaattggtagaaaattgctcttaacatcagtgatggccgggcgcggtggctcatgcctataatcccagcactttgggaggctgagatgagtggatcacttgtggtcaggagttcaagaccagcctggccaaacggtgaaaaattagtctaactaaaaatacacacacacacacacacacacacacacacacacacacacacacacacacaaattagccgggcgtgatggcacatacctgtgttcccagcaggaggctgaggcaggaaaatcgcatgaacccaggaggcagaagttgcagtgagccgagattgcgcgactgcactccagcctgggtgacagagtgagtgagactctgtcacgaaacaacaacaacaaaaaaacacaaaaaacatcaatgatattggtcacggtgctaaatctactcagcttttcctgaatgaaagcaattacattcaaactatttctaagacttaaaaaatatatgagactcatatattcaatatctctatttgtagatgaagtcacaaaaattattcactggaatgcaaagtttaattaggtgaatctatgtacttcaggaccaatgagaagagagctcttctaggcattttggccttgaaccctggctctgccaagttttcattaaactttctgctaatctgttaatcaatcgagatgcatttcaccctaacaattggtataccagccctaaatgtaccactctgtactggaactccttatatacatttgtgtttacaaagcttctcaactgcgagagctgtttcattcatatttatgtctcttcttcagtgctgagttgccttagtcaccacacggcacttagtaggaggtcaataaatacgtgtggagtgagtcataaataaatgtaaagcataggtgaattgttgatttctattttctcttaaagttgcatgtggagtaacttcagaagtcaagagaaaaatctaaagaaaaacagaataggcttaccagttaaaaatagtgtaaaaataaatggaagcttgtgcttactttctatatctttcaagaacacataggtgtatatggacatatactttcctgtaattgtttgcacacacttttatggtgacatcaaactcttgctctttataaatgaaattgctgtccttatttgtacacccctaggtatgtttctagtgtagagatatcacttccagatatttcagcatttgtagatgctgccatttctttgacttggttcatgtaataagcatattgtaccttcttgatttatgttctggatgctgttgagaatggagtgagtttacacccttgtcttaatgtgctcactttaatctcccatttctctgcatcactttgataaaactgagacaaccaccagctccctttcccttcccatccccgtcttcgcctccagccagtatgtatgtggtaaaagtaaacattagagagtcagttaaatgacaattcatgtctgtttcatttaatgtaggatgaagatagcagtaagagataaagtggactagcaaagcattttatactagattaaaaaaataagtgatgttactaaatgatgtggtaaagtaaacctatctggaaatattaatgaatcacttgttttaagatgctatcttaggagcctgtgttttttaccatattgtttaaatattcactgtatgagcacacatagtgaatgtagtgaaaaccatgtgttatagagtccttagaattatggataccatatagcatttgatttttgatatttcaaggaatggattgttttttaaatagaagattcctaaagttttaatgtctttgatcatatcataagtgtattatattcatgcatagatagtttttaaaatagtcttactacttcccaaaaaatttaaaagcactttaggattttaaagaaattttttctatggaaaaactgaagtgaatcgagtttatgtaaatttaaaaacctggattaaaaatgtggtcaacactttgttattaatatccccaagcactgagagtgaccacaaacagttttaaatgcagtggcttatcttgtgggtctctggggctgataatttctttttttttttttttttttttttttgaggggattctcgctctgttgcccaggctggagtgcagtggtgtgatctcggctcactgcaacctccacatcccagtgttcaagtgattctcctgcctcagcctccctaatagctgggactacaggcgccttcccccacccccagctaatttttgtaattttagtagagacggggtttcaccatgttcctcgtgatccacctgcctcggccccccaaagtgctgggattacaggcgtgagccaccgcgcccagcccctgagagtttaagaactagatgcaacagagcagagccaaagcatgtggtgtatgcactggatgtggctaagggctcttctgcaatactctagacaaatatgattctgccttgttaggtagttgcttaattcatagtggttgtattaccaagcccaagtttccttaatataagtagtagataaaactgattaggccgcctttgaatctaccaatatagctaaatacaagttttgctatattattctttcttcctcaaggacaatatatttacatagacccttcaagtattttaatgatcatttggtatatttattaattagaatatagaaagcattttgtacccatttcaatttttatcctatcagttgccctaaggcaggcagatatacatacacattttctttctttctttctttctctctttctctctgtctcttactctctctttctctctctcacacacacacacacacacacacacaaacacacacacacacaagtacacacacagacttttcctgtgagattccagtgtattactatttggaaaccagtttcatactttagtaagttaataaaattttcctggtactagtgccaaaattagcctcttaggaaatagtattaaaaaagctgaaaatattttattacttactgacttactcctagatagtaacatgattgagcatttaattctcatagtaattaagtgcctgtatcagatgtgattcttctatcatccccatttctttcagtggtatgtctgtttgctcaaccatctaaacatcttttaattctcctcccccatcctctgtccaaatagtcctcacaacctgctatttttcatttacaatatctaatttgaccctcttttgcatatcttttgtgggaagcaccctagtagcctgagttactgaattattattccagtacttttctaagcagtgttctctctcctgtctccccaacctcaaattcctccacagtgcttcatagaggaagtctttgcatttgtaaatgaatgagaactctggatttaaactcggaaaattggtctaatgctcagctttgccacttattaacagagtgatatcaggcaggtcacttaacctcccagagcttttgttccctcatctgtaaacctgaaaacataacgtagcagtgtctcaggaatgtgacaaggactatatggcacaagaatgtgaacatataacctaatgaatctataatgcatactcttatcatggatatattattatatggcattattttttgtcacctactgaaaaacatttgattttcttgctttatctactgattagattgtgttatatgtttattaatctagctcatggatttaaggccagccattctatggccttaactgatcgctccatttttatctcctgtgatttatcggtattctctctcaaatggatttcacctatggtgcttatttcacaagacaacctacatattcatgttatcccttccccaaagtataatttcatgttcctctacttacttttaaagcaccactcatacacattaaattccatgaaaccttgttgtatttcttcatcccaaagtaagctctatcttttctgtatctaaaccagtggttctcaactgtcccttcccagatatttgacaatgactggagacatttttgacttacccacttgggggaaaggggtagaatgctactgatatctagtgggtagagaggccagagatgcctctgaacatctcacaatgtaggagacagcctccaacatcaaagaactatggaggctacaatgacaataatgctactgcttggaaaccaggatctgtggtactctaattgaactgattataacccaaccagctttgagttgttggcattgtgattctagtgataaactgtttagggacagaggccttgtcacagtcatatttgtgtcctgagcagtgtaaagcaccgtgccatgcacatagtggctggtcagtcacatattcaaatgagtgaacttgctcagtaaaaatatctgctgtattaaacctgtattaatcagtggttgaaatgaaattagaatcctgagttaagggatatgaccacagggcatggggctacaagaacctcatttaaaataacatcaaaagtatagacatcaaatacttctgaaagtgaagttataatttgttgatcaaaaacattcaattgtatcctgtcacattcaatgtattccattcaaatgtataaaagttgtgagactgagcaaaggttgggggaggggaatgttggtgaaaggatacaaaattttagataagaaggtaagtttaaaactatatgacatggtgactatggttagtgacatattttgtattcttaaagattactaagagagtgtatgtaagctgttctgaccacaaaaataataattatgtgaggcaatgcaaatgttaatcagctagatttgattattccacaatatatacatacttcaacgtatacacatttggtcatttcacaatgtatatatatgcacaatatcatgttgtacatgatgtatttatgtagtttttagttaaaaaaacttaatttaaaaaaaattacttaaaaattggcccagcgcggtaggtcacacctgtaatcccagcacttttgggaggccaaggcaggcagatcacctgaggtcaggagttcgagaccagcctggccaacatggagaaaaccccctctactaaaaatacaaaaaaaaaaaattagctgggcatggtggcgggcacctgtaatcccagctacttgggaggctaaggcaagaaaattgctttaacctgggaggtggaggttacagtgagccgagatcgtgccattgcactccagcctgggtgacaagagtgagactctgtcccaagaaataaataaatgaataaataaatatacttaaaaatgatttctgtagatttttatggcctcatttgtaaaattttgacatcatgtttatttaaatgtgttttgtcaaatggcttctataagagacaaagataaccaatgcaatagaaggaaaaagaaccctgtacaccagaaatcccaccacatgttttgatcatttaaatagtgacgtaccaaaagaaataattcaaaaagtagggaagggtggatgagatgcagagaggattgctttgccattcccaaataaacgaaaagtggactctctccccagatgttggaagacttgaccaataatgcctaggagcagaaggagatgcacatggcccttcctggctaatccagagctctccacacaccaagacttgccaagagtctgtggaacacctatcagacctgattcgtttccagatcccaatcaatcctaatcagatttttaatctacccaacaatcacttctaatgcaccagttggttttttttttttatttagaaggcaatgctttttacaaaatagtgttatatagacgtatataatggccctattgtcttagagatatgtatatttcaagattaatggagataactcaggatctagaatgatcattctatcagagaatgatagaaatcctatcttggccatttattttctgtcactttggtaaaatctgttaatttttctagtctccagtagtccatgtatgaataagaatacctttttttgtgaaaggaaattaatttaaccttagtctaagcttaaattaaataatataaatgaaaatttgtcataaatcataaagtgctacatgactataagttatttcttgaaataatttgcacttagaattttttgagttccaaagttacctagtaaatgaagagttgatttacgccagagtataagcaagaaggcaaatgatttattttactttaaaatagttaaagggaacactagggagatatgactcttccccttccatgtcctgtctcactgggatgaacgagcccctaaaaaacctagaagagagctttctgcatggatcaactatttagaagctttcttttctcacccatgacaaagacctttacagaggtctactaccttttcttcactgctgactttcactgttttcctgtggtctgtcccactaccagctcgtgcagtgtgctttgctattttcatttcaaaataggtacttatgcaaaattcgaatcagcctgcatccagctttcccacaccccagaaccttactgcatatcttggtgattccttagcatcagcactgaatattctcagcttaaaccttctcctatatctttctttcccattccctttcctcatacctacctccaccttgttggctcagtaatcatctctgttctttcctttttttttcttttggagacagagtcttgctctgttggacaagctggagtgcagtggcatgatctcagctcactgagatcatacaagtctcaagcaagtctcctccctcaacctcccaagtagctgggattacaggcacctgccaccacacccagctaagttttgtatttttagtagagacagggtttcaccatgttggccagtctagtctcgaactcctggcctcaggtaatcctcccgcctcggcctcccaaagtgctgggattataggcgtgagccaccgcgcctggcctgctctttcttatcttcccaaaacacacatgtgcacaggcacacacactttacatacatatgtatgtgtacacgcatagacaaaaatttgagtgagatgtcctttttattttttcccaatgctgtgcatccaggtatggaaagcttatactataaatgcttgtaaataccttcatttggaaccaagatcactgactggaagaaagagaaagagatgatttgactaaccgtgaagcagaaactctaacaagtgctgtctgacattgagtgagctgtcatgtgataagaatcttcctgtcactagaagtattcaagtcaagactgaataaccatggttaagggccttaaaactgatttattttgttttaaaataggttaggggaacaaaagggagatgggactcttttctccttccatgtcctgccccactgggatgaatgagttcctagaaaaacagaaaacagctctttccacatggaagtatatagaagaaggttaaagttgagaatatgcagtgctaatgctgtggaaccaccaagatatgcagtaaaggttttgacgtgtaggaaagctggatgcagtccgattagaattttacataagtacttttttttttttttttttttttgagactgtgtcttgctctgtcgcccaggctggagtgcagtggcacaaactcggctcactgcaacttctacctctggggttcaagtgattctcttggctcagcctcccaggtagctgggattacaggcacacatcaacatgcccagctaatttttgtatttttagtacagacagggtttcaccatgttggccaggctggtcttgaactcttgatctgaagtgatctgcccaccttggcctcccaaagtgctgggattacaggcatgagccaccattcctgattttaattgaaaataacaaagcaaatgcacaagaggtaagagatttggctagttattaattctaagttcccacgattcaagcttcacttgacaaaatgacctttcagatatagatggtgaagtcctcatcttgataaatatgagtgttttcctagaaaacattgccattgccatttaatacttgaaagactattacagtgagttttcaccagtgaagtttatttcaggttttctttttacacaagtatacatgctcattataagagaaatagcaagtacaaaactaaaaataaccaaccagaaagaatcacaattagcaattagcaattaactgtgtcttttttcatatgatatgtgttacccaaaaagacatcatttaacatatactcatctgaagcctggctttgacgtttcatagcatgttttgaacacctttctagatcaaagaatatagatctacagttgtttttaatgattgctttgtattccactgtatgactaccttctataacttatttttaaaactgcagtattttaaagaagtctgtatgtttaagagatgagctactaaatgaatcttatctagttagcattattaattatgacagccctactccaggggtgaaaaggtgtttctggaccccatccatttgccttctcctactgtgaacaggtgaaatcgagctgcattcttactgcttttaagaattgatgggaccaagaccccctttacaattccttctcccttttattattaatggaaataaagcatggtttgggctaatcttttgaacttggaattcctggaatccttattcagagcatctactagctcagaagtcaatttacatcctccagcgataagctgtatgtacacagcgtttctgtagtatttactaatggctctcattctaccagtttctccctctctctttttctttcactacaaaaaattactctaatattttaagagattattctgtaatatttattaaacaattatctcttaattacatacctccagtttcgaatgtggacatcattgcaagatttatggtggcaggttggtaggtgggccagcaaacagagggcagagataggaaacagcatgtattaaatacttcatatgtgacacaaactttaccctggtcactcatttgattattacaggagcagtcagtcgtttctagtattctcattttacttaggaagaaattgagtctcaaagaattaaatttctcagagttaccatattaatttcctattgctgctataacaaattatcacagatgtagtgacttaaaacaacacaaacttattatcttacagtttggaggtcagaagttccaattgagtctaaggttaagtcagggtgtagtcagggctgtgttcatctggaagccgaagaggagaatctgttttcttggctttcccagctcttagaggctggccactttccttggctcatagccccttcttccagcttcaaagccagcagcgtatcatattttatttaattttttgagatggagtttcgctcttgttgcccaggctggagtgcagtggcacaatctctgcttgctgacacctccgcctcctaggttcaagtgattctcctgcctcaccctcccgagtagctgagattacaggcatgcaccaccatgcccagctaatttttgtatttttagtagagatggggtttcgccatgttggccaggctggttccgaacccctgaccttaggtgatccgcccaccttggcctcccaaagtgctgggatttcaggcgtgagccactgcacctggccagcagcatgtcatctttaagtctctctctgtgctgactttctgtctctccttccacttgaaaggacccttgtgattctgttgggctcacccagacaatctaggataatctcttcatctcgaggcaagttgattagcaaacttaatttcattttcaatcttaattgccttttgctgtgtaaactaacatattcacatattccatgggtcagaacatgtacattttgggggagccattattctgccaaccacagtcaccctacttgttggatatgattgtaattttgagtcaagtctaggtttgtctacctgttggtgaaatttacagacaggttctcctatgcaaaacacaggttctcctttgcaaaaatatctaacttgctgcctgtcacaatacattccatcactggttaatttctttgaggttcagatgcaaaagtcttcaagaatcccaaagtaaaattcagacattacaggtcctctggagaaggtttaccaacaacatattaagtacacaaggaatattttagggaaaggaaatgagggaagaggatagcaaagaaggtcatcgaaagggaagtgtaacagtgccaattttccttctaacctactatgtcatttggcccacagctagtcttagctgtgggatttccctctaatttaggcttacaaacatgtacaaacagtactgtgactttccttttatctattttctgaattattaatcgtatttactactatcttattgttactggagagtttaaagaaaatcacttagtactgtctcaactagaatgggatagaggtttatctacagagactgacactaaatgtagccagttcaatttgacacatttttactgacttcatagtatatgccagccacgttgcttaaagctatagaactcacacatgcgcagacagattctaattgcatctctgactctggatacattctgacacacaaaagcctaggtttacaaattcagaccagggtgatcttaatgaactaaaggaaacctagcaggaatcacacacccttataaaatcaggtgtcaggcaggattcctgaaagcctaaagctagaccaggtcaagggcatgtttctggtctacagagaaggggcagaaagttaaactccttggtccaactgagtggtcaattgaagatgctgagaagggttttgcaagtacgttaagaggcaaaatgacagagtctaaagaaaccagaacacagcaaccaggctcaaaagagagggggaaagactgaatctagataggatgagtcctctcaacctcactggtgaggagggagatgtcaggatgtccagagggttggagttcggtacaacaagttctaagatacatttttactctcctcaatatggatcctgtattgttcaggatattatcagaagtggaaatagaaggctatttctgagcatgagtttgatgaaaagagacactatgaagattaaagaaattgtgagtttggttgggggagggagcatcaggaaaaatagctaatggatgctgggtttaatacctaggtgatgggttgataggtgcagcaaaccaccatggcacaagtttacatatgtaacaaacctacacatcctgcacatgtaccctggaacttaaaataaaatataaaaaataaataattgaaatttttgaaaaagcaattgtgtgtttggtagaggcagaaaaaaaaatattgtcagctgacagtgacattgaaactaagtccagatgtccctggaacttgaggagagtgatgtaaactgacaagacattagaggcaggacagtagtagagaacataggtagggtcagagatggagagaaagccatgtaaaacaaagaggcagccatgggtgaggacagcagagcagaggtagcatagccacggcagaggcagccacccagggagggggacgcagcaccagacaagtagctgcagtcagtgagtgcatttgttttacaacagtagcaagctgaccctcaatgcagaatagttccagagcctgtatagaccagagctgggtgtatcagtgatcccctgttgatactgacccaaaaggcagtttaataatgagttttatgagaaagagcagttggccgggctaggcatactcaagctatttcacagttcttgtttctgaggctatgtttaagcatggatgaatccagttcaatgaaatttgccaaatttctttttggtaagtcaattaagtaatatttacccttgcattttagtgggataaaatagtttcattaactcttgatagtactaaaatctactaatcccagaaattaaactcctgataatataatatttggagatgatggctgtttctgtccttcctgtatactacttactgcttagagagaataagttatcagctctggtcagatatcagagtccctggagagtttcaaagcccaagacagccccagtaatctaaatccctggtactgggacacaaacattgatttttgttgttgttgtttctttttagaggtagtatctcactctgttgcccaggctggagtgcagtggcacaatcatagctcactgtaaacttgaactcctgggctcaagagatcttcctgcctccgcctccctagtagctgagcaccgtgcctggttaactttttcaattatttatagagatagggtctatgttagcccttcctttttaaaaaaacaaaaaaattaatacagagatgggggttccctctgttgcccaggctagtctggaactcctggactcaagcaagtctcctgcctcggcctcccaaagtgctgggattataggcatgagctatctcgtccagcccaatatatatatatatatgttttttaaacaaactcaagtaattttaatttgcaggcaagactgaaaaacactggatttaagagagtaaatccttaatcctgcctagacatctgacctctttttttttagtactgatttcactgactaagctaagtctaccttttttgaacagtggttatcaaattttagcatgcatcaaaataacctggagggtgtcttctaacacagattgaggggccccaccccagagtgtctaattcagtaggtctggatgggattcaggcaatgacaatgctatttacgttggaggcatattttgagaaccactgttctaacaagatggtgtaaggataaaaataatcaagcagagggtgtagctggtaacgtttttttttttttttcatcctactgcctgtccacgtgacctcagagattcaatctatggcccagagttaatatcaaacataagatttcaagtactttatcttaaagttactcatgtctgataacctgttgaagagttttgcagaaaaattgtaggtcaaagtgttgaatatttaaacttcgaggtatgcaaaacccagctggcagccaggtgcagtggctcctgcctataatcccagcactttggatggctgaggcgggaggatcacttgaagtcaggagttcgaggccagcctggtcaacatggtgaaaccccatctctactaaaaacaaatacaaaaattagctgcatgtggtggtgcccacctgtaatcccagctgcttgggaggctgaggctggagaatcacttgaacctgggaggtggaggttgcagtgagccgagattgggccactgcactccagcctgggcaacagagcatgcgccatcttaaaaaaataaaaataaaaaataaaaaataaaataaaacagctggagatgtccgtgggaatgtgtctatgtcaatttgtttattcatcttaaacatgttagtatgtacatcaatttttcattttgttaaatatgatcagattaatttttaaaaatacaaaattaagagtatttgtacactttcccttgcccctgcttatatgcagaaagtttcctttgttagctaagctagcaactgggcttttaaactggggctggatgggaaaaaagaccttctggttgagacatgtgtggaaaagatttttaggatccttgctgtggggggtgcatgacataattgtctcttcattgtctccataaaagaactccaataattgctaatgtttattgagttctttctatatctattccttctcaacctccatgcgagaactgattcctaatgccctgaagcatgcattgtatgaaacaaatttacttcatgactatacgtcaagaagggtactagctatgtaccatttagaaaataatcactgaaatcgcttcctgtagaggtggaatctaggcactgctccaagagctttatggtttgtagcttatttaattgtcattactctcctaagaggagattctattatttatcctcattcttacaggttaggaaacagtcacagctaaataacttgctcaaggtcatacagtaagtagcagacgaaggatgcaagccaagagtaccctgactctgcagcccgtgttcttactggctctgctacaatgggttcactacaattcaaatgttctggagttagacttgtattgcctttagatttactcctttgctgagtcaggtgacccagcatatccaggctctaagaaggtccctcacattgttactccttctatcctatgtgttttcttgcatctaaaactagttggggatggcaacgtacattggtacagcaaggaggagtgggcagcagatagaaagtcagatctgagaacagtggaaaactaaccctggtttaatgtctgccaggagcctaatgcattttctcacttcattctaaaataaaattagtacattttaaggtaaaatattttgtggtttaaagacacagagattcagaaagataatgaaacttaaccaatatttcacagcaagtatatgacagagttagaattcacaccagggatgtggtattagatttaaaagtccaaaatatagatatgtttatcactatcatttgtaagatattatttacagaactaaagattttaaagcaatttttatgtaaaatacaaattatcttggtaatagtagcattatcactcattgatgtcaactagggcactttctgtgaaagttatttaaaaaaattgaaatttgtttaaacaaaaaagtaaatttatttgaagccatggaggctgatttcaggggtagttagaaccaacattatgagaacctggggcctttctgtttctttgtttggctcaactttgttccttagcctcattctccagagcaatatggtgcaagaaggctgcagcacactagccccctatcagttacagtcaagtccagtgggaagagccagacttttgttgcagtagctctcaaaaaattctgagatttaccttaattgtagtagttaagatcatacgtccatccaggaaccaggaagttgtatgataaacatacttgggtaacagattttatacccatagctagggatgttgctagggaaaaaggaaatatgtcctggaatggaatattttaaatgtaaattatatttgttttgaaccttgccttttagggaaggaaagaaagagataaagctagaggtaggactttgaggaattgtacttaattcccagcctatgctgtataggccatagcctgtaatctatatgtgcaaatagcagtgcatacacagaaatttattcatcattcatttattcgttcattgctcattatctgccaattttgtgtcaagtacagttctaggtgcaggatttagaacaatgaagaaaaagtggcctctctgccttcataatactttacatacatgggaaacaagtagtagacaagtaaacaggtaaggttttaggtggttgtcagccatgatgagtggtttaaaacaaaaggaaacaaacaagtgggtagctaataatgaaaaaatgaataaatgtagaggaggcttaacctatccaaagcatggtcaaagaaagcgccagttatgctttgttcaagctgagccctgatgagtgaaaaaagaattaaccctggaaagaccggggagaaattgggcacctgttctttgtgccaaggtctgaggtagaaaagagcttcaccgcttcagaactgagaaaaacccagtgcagctgaagtaaagtaacctagagagaaagtggaggaactgagtggaagcctgtcattcagacccgtttgttctcttcacttaaagttttctcttccacttaaagttttcaagcaagggaaggatataatctaatgtacttttgcagatctatggagagctggattggaaagttttcaggttcaagcgattggatgaatggcaaggctttttactgacatgggagatgtgattttggggaaatgaaaagttttgctttaggcatgtcaagatggcgatgtctgtgagtgaggtggcaaggatgtaatttcagatggagatgtagaactcaaaaaatctgagcctgttttaaagtggaggttttattattcttcaggtatcttgaagccaacagatcaggacaaattgccattgaaaagatgtttgttactcagagttcccatgaggagggcgcacaccatgccatgcagggctccatggagaggcaccggtgttggttaggaaggagggggcgagagaaaagcctggacagtgacagtaacttttattgtggtttctgtgggaaaagtgaggtagggtaagcagaccgatgactggctcgtttttaataatttcagcaggctcctgggtatagggcctatctgtaattatctggtaccgggccctgagatgattagggcagaggaatgtattgcctcctggaatgtcagagccagatagaggaggtggtttggaatatgtgctctggatcggatagtttgcctatggaaggcatgctcttagagaagcagcttgctaatctctaggaattagctagccttaagaagagcagttccccttgagtcagcaaggctgcagatgccagagcatcaaaaatatggaaaatatgaaaatataattaatacagggtcagaggcacaagtttgtaaatggagtctatcatgtgtgtggcatagggagagagtgtaggggtgggggcaggttgagaactactctgtcactcttccagatacccttggaaaaatgttgaaaagtgcattcaggttggaaaatattatttcttttttgttgtttccttcactactaatgattatggcatagggagcacagacaaagaagttgcagctgttgtcttcccaacccggtcctgttgcccaaactgctcttatatgctattttcacatagacctatgattgtgggtggaggaaataaaaatatttacccattatgaatacaatgtacttacagctgttgctgcaccttaatttggaatctgatagttgtttctaaaagagttaagtggtagttcagttaatcggtaaaactgccaagttgccaggtactttaattaaattggttgaaatgaaaggtggtgattgtcaagcctgacaaactaaaattctttattgaatctaattagggtgcgaagaaagtattgttttaattcttcagagcttgttggacgtagtttttgatacctttggtacagtttcagctgcactcaagcaaagaatttcatctattgcatcaaaacacctctaaatcataggtatttaacttttagatttgaatctaggatatataaattttattatttcatcataaaagtaattctaaaagaataattctgggtacaatattgttttatgtatttatttattttaaatgctataaaaatacagatctacatggtgaaaccccgtctctattaaaaatacaaaaatacagcgtggtggcacaggcctgtaatctcagatacttgggaggctgaggcaggagaatcacttgaacatgggaggtggagtttgcagtgagctgagatcatgccactgcactccagcctggatgagagagtgagactccatctcaaaaaacaaaacaaaacaaacaaaacaaaaaccagatcaacattctgctcttcaaatgtatttcaaaatttttatttcatagataaaacattacaagctgcatgaaggcagagactatgattgttcaccattttattgagtgcctggcatagcacttgacacaaagtaaactctcaatacacacctagtgaatcaatgtgcaccaagtacattacaatggtagcaagtatctacgcagtaagtgttgccatctcctcatgcattgtatgctgtgtagcctcccagtagcttgctttcttcagctttttttctgttttgcttctggcaatatttcatcattttatcatatgatattagtaatggcacaaatggaacaaatcagaaccatagaatgaattacattcctctttgattataattacaagttaatccaagcttgtaatctgagcatggcttagatggcagtcagttacactacactaacattgccagaattttcaggtaagctatatttaacctcacaagtacacactggacattggttggcccatttcttggatgaagaaaataagacaagtagacatttaggatatatttagatcaatgaggttagttaatggtacattaagcactagagtccttggttttaagctttgccgtgttcagcacccaacaccaatatcataaacaatgtggagtattttgtattcttttttttttcctatctagtaattttctgaatctctgataaagaccaggtcacatgttgtcgttgacaggactgctagtgttactattttttactgagcaggattaaaactctagggctgagtatacaatgagcgtgagctttgttgttctccatttgagttattcagaaggtctcaataacagggaacaaatgaaacatcctgtagggatccccacactattattattctttttttaaatggggtctttcttgtcacccaggctggagtgcagtggtgtgatcagggctcggtgcagcctccacttcccatacacaagtgatcctctaacctcagccaccagagtagctgggactatatgtgtgcaccaccatgcccagctaattttttttttctgtattttttgtagagatggtgtttcaccgtgttgcatagcctggtctggaactatgggctcaagtgatctgcccatcttgacctcccaaagtgctaggattatatgtgtgaaccacccgtacctggctaacactgttatttttatgaatatattctacaaaagaccaggctcatgaaatattgcatgaagtaagaatttcatagtcaaatatgttgggaaatgctgcctaccttatccttctcatttatttatttatttatttattttgagatggagtttcgctcctgttgcccaggctggagtgcaatggcacgatcttggctcaccacaacctccgcctcctgggatcaagcaattctcctgcctcagcctcccaagtagctgggattacaggcatgcgccaccacacccagctaattttgtatttttagtagagacggggtttccccatgttggtcaggctggtcttgaactcccgacctcaggtgatccgcccaccttggcctcctatccttctcttagagagtcacagtagtcacagagtctcaaagaaaagaaaccctgaactcagcatttctcatacttatttgatcactggcattttttttttcaaataacaccaattaatgtcccacaaagcttgtctttcaaagaacacagctcatgattcactctatgggctagaatgatgattttctgtgtgtgtctatgacatatgatgcttttcttttgctgaatgattttatttatgagataacacaataagaacttatgttattcttgagatgtaatgccacattgctgtctaaaaagaatataaatttggaatactctcaggggtatactagcatatgatcttcattattgcaatatcattaagattgtgatttttttattttcataattatcactaaattcttgacctaactaggaatttgtgctaattttatttctgtcatctttagtcttactaaaggacttgaatttaactctcattcaacttttttttaaccaaaaaatacttctttaaagacatgatattcgtttgtgagtgatgcagtacaacaaataccgcatgtgtgatatgtgtattgaggctttctttagactttacctaagtgttaaatgtgggctccgttatatctagacgttccacatttgtgatcaaactgtagtaaatatgtccttttctaaggtgcataattagagtatttaaacttgtattccatagagtgagttagtaacatcaggagaaatgatagtcttatctgtggtctggctgtaaatataaagtagttttatgttggctaacttgatttcttccatatttttaaaaaataagacagaaacaatagtcagaataaagctacactctatgaagtagagagagcaattcttcatttgaggggatattttctcttttttgtataattatttggataattgtgtaggagtgcctaacgggagtgaacccatgatggtcaataatttagaaacagaattagagcacagcctttgcctagtgttaaataaacaaaaatttgatagtcacacacatctcacggtagcactgtgtctagatgcagcgtgaagcggcctttgctattaactgaaatgttcttattttccactggactgctcagtacgtttatgatacatttgtttaaaaaaggagaaggagagtgtggggatttgtcatacatttaacttctttataaatgatatttctttttgtttataaagtgattctgtctgttcaccatcattcagtggtaaaaaatgcaaatggaatttgagaacgtaacatatggaagatgtacagggaaggcgaacatggcaccatggcagttgctaaagtacttacatgcttgatagagggagccctgtgagctttcgctgttctatcagtgtgaatcagtgtcccattctgtgaggaaggaatgttggattgctggagagtctcattaagacttggcactttcttggaaagacttgcaagaagaaagtaaaaattatacctgacctcttcctcaggcagctcaccctcactcccaccttcctccaaacctattatttgcacctatgtgttttgagatacgtgttcacagctttatttttacaagactaaaatgcttttattgaactgtgatttgtcatttagacaagactcattgccttcattttataagtgaaaaataaaatgaaacagcagaaatattattgtttgtgtattaaagaaaaggttcaaagacattattattctttaagtttttgaagtgtaaagacttactcacctacaccaaaagggcgataaaaatttcttatgcaaccttgttttctgtaagttttttttttttcaccacagttcttaccttcctctttgctgagaaatattaatgttcttatgggtattatctaaactgaagaattcataattattttggatttaaactctttggcaaagcttaatgctcattgttcaatttctgtctgcctttttaaaataacagtgctccattccaaattttgtacctgaacatgctcccatagccgtggcaagaaaacacttcagacattgcaaagtctatgtgaacttctagaaaatgtagcctgtgaggaaatagatataaaatatccgattaactgattttattttatttagaaactactttatttttcaatcaagaaaattaaaatgacaaaaacatacaaagtaaatgaataaaggttattcttagataaattggcttttaaaacagcatagagatgttatttggggattccttgagttataagataccagtgaatattggccaagaagcaagttttctgttgaatgcattagcttgataaatgggccttttgttttattatctgaagaaattaggtaacaatatactttattatctaactagaatacttttgagagagaaagcaggacagtaaccacgccggacatgaaaacaaccaacatcaactgggacagctctagaaaagtaaaaaagactggtcaatctacggattatggattttcacaaaagtaaaactcttcactaatcacagatcattattagtattgcgttcaagatgctgcacttggcaacttgaaacaactgagaaataacttggaaatgaacagacaggcaggcctgtgctcctggaatttgttttgtaggcaccagctacaaaacaaacatttgccccaagtagaatgatttatgttaaatggcctcggtcaagctgctgctgttcatgtttgtaaaatagttatcatcagtgtacaacagaaaccaagcaaataaccacattagaagaaaatccgctagtgaaaagaaatcccatgaatgaacagcatttgatacctggtataaaaaagatgattctgaattttcatcttgagatgtgtcacatagagcttggaaatgaatatccataccaccagttactttgtgttcagttaaattggtaacttgcaagagaaatatgaaatataggagtgagcattgtctctttacatttggaagaatgttaatagtaaagatgcataatgtctaagcttcattaaaatactcttaaaataatacaactacgtctgacaaaatgtcatatcttagtagtcttttcaagttgaaatcttaaatattattcactcctggatttttaatgctagggctgcatataaatcagaacgtgtcaattcaggtttcatgtcagagtttgccaaattcctgattggacttcactagtctatgggtgttgctaattgaacagaaattgctgcttaatagtaaaatatcatggctatgtattcattacattttgtgatttatttttacttaataaactactttagttatgacagccattattttcaaagcatactaaatgccaattcaagtgtctgttgaactcttgttctgtgtaggttttactagctccatatgtgattcaaaatcagcaagatgtagcccctatgaaaaagtggtgtggaaagccgggggaactgacaaatcagacacaactgggttgaaattccactgcttacatgtggtgccccgagctgtgcagtccttctgaacatcactgaagcacacaggagaaactgatgaagatgaagttctcaaagaaatcattcaaacaagaatagtaaggggaattaagaagaaattagtaaaagaattgccaaatcccagtgaagattctgtgttgactacatagagaatctgtagagaacactattttatatggttctgagaacctcttgcagagcttaggagcctggaggccatggtctcactggcttggtaaatagtgagaaattttactgtattattgggatattgtttcagtaactgacagtggtgaaagaactgataggggtggaaatgataccagaagagaatctttgacatggataatgtgaaggaggctttatcatggaggtttgttgttttttagttacttaagggatggtagcagatgatagtgagaggaaaactgtaaaccatctgctagagacatcaagtaaagaggaaggatattttgcagatctatactaaactgtggcatctagagaggtgaaggtttttgaagaggtggcaatgaaactatcagtttctaagaggcactgaggagtaagaaataaagaaatagacaagcccctactcctcatcttgtgggaagtagatagtaggaacagaggagcctctgttgacttcggagccagtggtttttttttttttctaatgatggtaagattcaatgaaggcaaagaagtgagggatcatagaaaagctcaagtgcatagaagtagaattgaatagcaatgaaaagagcacagtgtttcctgagatgatacctccccttactatccaccataaactgatattttctattgtattcctttggctaaaatgttggttgcaacttacccaccagatctcagtaaccactaatggaatgttttaggaaaaaacatacactagaggatcttggtttttgcaattaaaaaaaggttgtcaagaaactttatatatatttacagcaagcagatcaaattcctttcctttgtcttactgtttattttatgttattttattttattttgagacagggtcttgctctattgcccaggctggtcttgagcccctggcctcaaacaatcctcttgccttggcctcccaaagtgctaggattatagtcatgagcctccacatccaacctgtcttactgttttaaacaattattcaaaaactattgagctaaatactgctgatatttattttatggaaatataagctgcctgcatttgacaaaatatcttagatagaactgtctttaatgccctattagtgataaaaataaatcttctggcataagccagaaaaaaatagttcacttaaacaaatatttagaaagcccaaataaataggtggtataagttaatgaaaggaaagcaattgtttacattataaactagatcaccttatgattaactgtattcttatttaagaaaaaaagtcaagtggacaaacctggtaaaatgaaccagtcttaaagaggctttgatttgcacacacacaaaaaaaaaagaaagaaaagaaacaggaaaaaacaaaaaagcaaagaaacataacaaaataacatgtgttaccctatctcattcctcccccgcaaaaatcacatgtttactaagatttacatgttccacatacattttgagcctggctggaggcataggacaatatgagaaaagaaaagacccagaggagtctttaagaagaaacgtatttctttctttttcagctatgaaatactttatatataactagttaaaagactttttccttaaccctgcacccttttgtgataaattattacttgtacatattgtacagcagcagttctcagacttttggacctagaacctctttctatttttaaaaaaattgttgaggacctcaaagagattccatttgggaaatatctgctgatatataccataatctaaactgaagaaatttaaagcattcattcattgattcatttgaatataataacagcaatcctatgacatattaaataacattttaattagcagtaactatatgttcctaaatgaaaatattagtgagaagaattgcagtgctatacttttttttttttttttttttttttctgaaacacagtctcactctgttgcacaggctggagtgcagtggcacgatctcagctcactgcaacctctacctcccaggtttaaccgattctcctgcctcaacctcccatgtagctgggactacaggcctgcaccaccacgcctggctaactttttatatttttagtcgagatggggtttcaccatattggccaggctggtctcaaacttctgaccttgtgatccacccgccttggcctcccaaagtgctgggattacaggcgtgagccactgcgcccagccagtgctatacatttttagaaatctctttaatgtttggcttaatagaggacagctggattctgatatctgattctgcattcgatctggggtgatatgtcatttttgttgatttatatgaagaaacctcagcctcacgacactgtcccttttatgaagaattttatcatcatgctatatttaatgattagaaattgaatttcacccttatatagaaaatattaaaatcatcccgtttatagcaatcctcatattgcaaattataaatgtaccctttaggttagaaattatgtgattgagtttagatacatagaagcctatgacagaaacatgcacagccggtaatgtctatatttgaaagtgaagttcattaaagaaaggaattatctgctctcttttatggttctctctgattatatctgtgaaaaggataactactgctttgtcatttcagtttcaatttttattcttagtaaaaaaatcatttattgaaatagtaattacttgaattactttttatcatcacagcaggaaattatagcaagcgcttaaaaaaaatgcatactcaggaactacttaaaaaaacgtaaatggtttttgctgaaaagcttagcatacaataatgaggagtccaaaaatgtttttgttactcctaaaacagagtggcttttcaagtaggcctagcagctgaggttctgttgtctgaaatctgctccaggcagtgagcatgggaggagtcaggagtacctgcaagattagataataataatgactgtttcctctgcctccctatctgaggagccatcgccaccagtatttccaggcaattaatgtgggaataagcaggagttagttcaaatgactcctcacagtcacagaggtgctgttcgtgtaaaatctgacatccccatgtctttaggaaaaggaagagccttcagtggcagaaggaggagcataatcttccaggagggaggccttgtgcagaactgagatcccttaggctgtgcgaaagggcttcagtgtatcctaaccgcccctagacctagtagcacagtactagactagattgcgctgtttattcagcccagcttttctttgcctcagaggctcacttaatgatacaaggtatctcaaaccttgaaagataatttttaactagaaagtaacctatttgtaagaatgatttttagcaagtggttctaactggcatgtgttttctggccttagggagctacaaaattgtttcaaaaggaaacaaatggacctaaaaacaaatgactggtaattgtggctgagaggcttacgtatgaagggaacttgtttaaaagtgccatgattttattaactgatagatcatcaaaacctctctgtaaccatggaacaggtattgtttttaaaaagctagaaaaaaagtacttatatttcattataagattttatgttattttaacatgtgaaacctttttgacggtttacaacaaaatgtttctatttttacacacaaatgtttatttaatatggcattttctttctatccactgtcaggtatgcagcaagatcttatatagtaagactgttttgaacatgaggattatggaagaaggagacccacagttcatggttaaacctcatctattagaaaaataaagaaaaaattaatgggtagtcctagtttaaataaatactgaaaatcatcatgtaaagaaatttatattgatgctaaaaagtaaacatttccctttggtggaaatttaaattacccagcagacagtgttaacttttagtgaaagatgcacagatacataactcaaatgcaaaccgtttgttttttttttctgctttctttttttttctttctgttttcttctttaaagctcactttgagtggccttgcatttggcagtctccctggctcaaatgttcctaccccctttccctacttaaacgaatttctccatgtttggagacttggattgagcacattctcatcatgggaaccattactgactaatatgaagccacttcgtgctcccctacccaccagaatcctgtgagtgtatcatgtgtggggatttcagtagtgtgttctgtcctgtcttccctttggggactatgtcaccttcatttttgcatctgccacccctaatacagacccttgaatgtggcaaattttcaaggtttgttgaattgaataaatcaattaatggatttagcttttgaaccatcaggaaccgaagaaggtctctaagcttttgtcattttaatgctagatggatggagtgcacatgtttttattatttagattcttttaattaaaaatagcatctgagacatccaaaggaaagaacaaaacaatgttagcatatttctctctaaaatctatggcaaagcgaatgtttgctagagattatccaccatccataaaactactggaaaactttgttttgatctgtgaggtacataccagttctaaagtattacttgtcagctgaaactaatagtaaattaaaactaagtgactgttaagaatgttacaagaaaataggatacagcagtgaaggaaacagcctagatcagtgctcagtatgtgatagatgagaccttcattaaatacttattagagttgaatggaaccctgagagactgcatcatgtatctggactaatacacagtctggtgtgatgtaagtgaagggttggtgtggagacacccaaggggaatgagactgggaatgtaaggaaataagtcatgaggttttggtgtgttgttctaaggttttagactttatcctcaagtcaatatggagttagttaagggttttcaaatggaaatggtatgatgtaagctggcattttaggaagatcactggggagctaattggagattggatgggggtgaagagaagaatatgaaatgggaggcagatacaccaggtagaaagccattgaagaaagataaggatgctgttgtggcaaagaaaagagggtgtgaattccagagatgctgaggactttgttgctgattaggtatgggagtgactgaatcacagaagcaggtttgactcctcatgttctgctctggtagctgaaaggaagaaaacactgttttctacaatatggaacacaaaaggagaaacagctttgcaggaaaaaataatgaggagatcagctttggacatatgaaaatttcaggtgctggcgagacatctagacagacatgtgcaatggaaacgggataattgggctgggagcagtggctcacacctgtaatctcagtactttgggaggccaaagtgggtggatcacctgaggtcaggagttcaaaagcatcctgggcaacatggtgaaaccccacctctactgaaaaatacaaaattagccaggcgtggtggcacatgcctgtggtcccagctacttgggaggctgaggcaggagaatcgcatgaacctggcaggtggaggttgcagtgagctgagatcatgccactgcactccagcctgggcaacagagtgagactccatctcaaaaaaaaaaaaaaaaaaaaaaaaaagagagatagaaaaaaaaggaaaggggatgatcttggtttagagatgagaaaaatggtctggatgagtctacagattttagagtgatctatgaaccagagggtgcaggggcatgagattggataagttcagtcagatgcagagtatgagaccagcctatctctgagcacagagctctggaggccaacaataacaaagggattccttgagaaagagaagcccatgaaggaaatggaaatgagacattcagaaagcccagaataaaaccaaaagtgtagtgtcacactgttaagataatagattctggggtgaaacagatgagatttttaactttgattctagaaatactagctgtattgcactcggcaaggtaactaactttcctaatgcctagtttcctgatttcaaaataggcatgataacagtatctatctcagaatattcatgtggggagtaagtagtatcatatatacagaatgcttggcaatgtccagtccacagtaagtacacaataattgctgttggtggagggagtatcagtagaaacagaaatggtagagtagtagtagcaatcattgtcataatcatcatcatcatcactattttgttaagaaagttttaaaatgattgaatgtaattttaaaaacaggaaaatattggaaaaagataaaggaagacaagcgcctgaaactgctccatggatttaataacttacatttgtttggtggccttgataaacacaattttaatgggacagggagacctactggcataccaataaagtgtaaaggaaccaggagtgattatgtagaatcctcttttgacttttatgggaaggagaaaaatatagcaacagttcagcatagcattctcagcatgttcctgccccattccaacatggctcttcatgaaaccaaatcattacacctatggttggcttcctttgtccatactgttcttcctagaaagtatgagctcaccctgatcatccttctctctaagactcaaccaaactcccaaattttccaggaagtctcctctcaactcttcctttttcactggctctttcgtggtcactacatacacctgcggcaccctcacatcacccaggacggagagccttaaaactagtcatctacttcccagagagattctacacggtggttctaagagcagggattcctttccagtattgtttggttatatagtgcatgattggaatttgttttactgataatgataaagtagttggaacacatggcataatttaaagttgcttttttcattaacttagcacatgtgatactgatatcaaaacctcacatttacatacatagctaaggcatgagagccttcagagaacagcactgcctactgatgctagcaaaataattatccttcagtttagagtggcttgcatttaagtttctttacaataaatacaaccatttgaaattgtataaccattcaaagccaaaaatttcatattttacaagaacttttcatgtgttttataagttctaaagaaactttgagttatgaatcatcataatctattttaggatattctcaatatgtttttatattaaataaacaagtaattgtaatgtaagtggtagaataagtttgctcaaatacttaggctgtggagaaaaagttatttaataaaacatttcattttatactgtattttcatgttcgagagatatgttacttcagtttataaacattaaagacttgtaatgagggaaaaaataagaaagtgatagtaaactgagatttttgaacatgcacatcttcaaacagttctttagcaatgtgtacactattaggaggtctagcttctgaaatgaagtttaacgtacatcaattgttgagatgattaattggagctagtagatgaatttaatgatcatgttgctctctctcttatattctccattggaagaacaaaagagacaaaggaaattatttgcaatcattattcctcataagaaaagaaataaatcattctgtattctgttctctgatttcattatagcacctgtcatgacgaaaaatttactacagtgctattggccctgtgggcatcaattaatgttgatcataattaaaattttaattgcaaatagaaacacagtgtatgttatcactttaaaaagtaattgtgttcttgtatattaaggttgtaggaaacttttattcataacattgatttggaagcttgcccttttattagtggttactgttagaagaagataagaatcaggacttgctcactactcttgactccttttcttcacatataatgatgaggaagatagttttttcttgaaagcaaagaataagtttgactattcaacaatgcaactctctgtgtttgtgcagatcacagacccacacacaaacgtccatagtaatattagagtatgtgttcttttgctttatactcattgattttaaatccttaccctataaggtatttatcaccatgttacaatgtaggaaactaaggcacaaagaataaatatctcacatcagacagagtaattggcagagttggaattcaaaccctgcaaaacacgtgtttcttccactaaaacacactgcctcttaggccaatatgaccacaagaggcaagtgtggttcatgcatgcctggttcagcactagaaggggtcagtcagggaaccagtgttagacattcagaaatatgaagttgagtaggtgccaggagtacccagtgctctcttaacatattttcaaatatggaagaaatcagtatatccagcaagtcacaaaccaccagaatttctccctaatgaagaccttcatatgtatgctaatatgagtcactgaatgaccacaaaatgggtgctcaataaatttttctgaaaaatccatgaacagggacaattgagatcagccctcaattcagggtgcagactgctgttgactcaagcaagtcattgttaggagcgaattaaggtggtagagacacttagttttagctttttttggacacatcacaaattgcagatagttataactttaatagcactttagttaatgggctcccgaactcttacccttttgaaagtgttgttttcattcccttacttgagttgaagcagctgtgctcatcagtcatagaaagtaatcgttatgtatctgtggctctaggcatgcatttttatgagggtgtgaaagtgggaatcatttattcaatacacctgtggaaaactttccaaagtctaagtgtgtaaatctatggcttaagtgtaatatgcttgtctggagaaaaagacactgaggcttttctatgtacttttttgttgttcatctgataaatattgacaatgaaaaaaatacatgttgagcagaggctggaaatacactatgagtaaacaacggaacatgtgttttgagttattgaactaaaataaggcaaagtagcatctaaattacaataataattagacggtcatttgcccatctgtcaacatttcttccttacactgctcttgaactgtccaagttttaagtatctctaacaggtattgagcctgtctttacaagtcctatttatcaaaaatagtttaaagaacaatttagaatagatgaatagagatgtatgcaactacaagggttgtataaaaatatgcacttgcaatatctaataatgaatattgctgctgtattttgtgaggcagaattccctaatttatatggtccaaggattatgaaagtgagaatgagatcagattcctcatatagagaaattatatggactagaaaacatatggaaatgtgaatttggcacagggggcaaataacagctagctgtgaggagctccctggcagtatcgatttttgggtcttccatggtccttaggtacaaatcaggttgtagctgggtttttcccaatgatgatttcaaatatgacggtctctgatactcttagccttttacacttgtccatttactttccagatttcaaatgttacattgcatttgccctgtttcctgttttctttgttcttgaggaattatgccattttatcgtttactggactgtaattttttgtggggcttcccagtgaggtagaattatcaatggtcatctttgtgtacttttctaatcatgagcctcaaaccttgtcttcagtacactacaatagttctctcaatgaattttgagacttaaattaggaattaacttggttccctatattctactgaaccaacaacatgtttgaattattgcaatcattaaataatcatcaaattgagcaatcccattgttgcttggaatggctcaatagcgaagtctgaaccagaatttctggaatagtttaggcattgaactaggacaataatactgttagcactttatgggtctaaaactcaatgtacctggcaaacttttctatatggatcactggtaagaatgagcatgtaagaaaaacaagctcctgatggacaaactgatttaactaaatccatgctccagctcatccaccttgctgacaggcaagccccaatgtgagggtctcctggcatccaaatatacacttgagatatacaactcagggatgctcaagtcaactttatgcttggcatatttgagtaagttttctacccaggtttttctcattctgtatagtacattccttaccattatgctattttaaaatatatatagctatatagagagatattttaatatatatatacatacatatatatatgtatagtatgtggcaagatttcttatatttgcctcactctgagcctatggaatttagtttgtctcattatttcaggcccccagcagatttcaaaattaatattaggatgggaatagagagtttcccaaaagagggatcactagcaactgacgtgacagctaacatttcacagtaatggaagaaagaaaaaaatctattttaaagcaagcccagaatctcaaatggtatgagggaggctatttagcgcaagtacagaaagtcttgtacttctcaataagcccagaggcatcacttgattacagagcagtgtaataatagctgttgataattgtgctctggagtcatcaagcctgtgtgccccacccctaaaccactatagcaaccttttctccactagcttaatccttactgaatagaacaataaagctctctttctttgtcatttctcccactatattgtgagcttgccttctgtatctacgtccctagcgtcagcatagtgccaagcctataatatctactctcagtgatttgtagggcaaatggattaatgaaatgactatgtatacattatatatatgtaagtacatacaaaggtatatatgttttatagaaataattacaggtaaatatgatgagaatcagtaaactacttttgaaacaaaataaataaaaataaatcccccgaattctcatggaaatgaatggagagaggtggaaaaaagataaaatgaataaacacaaagatatttttgaatttaaaaagtgtcagctaagaagataaacaactaacatttgttaagtcaggagaaaagcatctaaaatactctgttgttattactctacagatttgaggtaaatcctttttttttttttttttttttttttgagacagggtcttgttcttccccccaggctggtgtgcattggtgggctcatagttctcagcagcctccaactcctgagctcaagtgatcctcctgcctcagcctccctagtagctgggagtactggtgtacatcattgcacccagttaatttttttgtagagatggtgtctcactatgttgaccaggctgattgcaaatcttagcttttcttttaatgactccaacttgttacttaactttaaaggctccaattattttattattattattattattttgagatggagttttggtcttgtcaacccaggctggagcgcagtggcgtgatctcggctcactgcaacctccacctcccgtgttcaagcaattctcctgcctcagcctcccgagtagctgggattacaggtgcccaccaccacgcctggctaagttttgtatttttagtagaggcagggtttcaccatgttggccaggctggtcttgaactcctgacctcaggtgatccacctgccttggcctcccaaagtgctgggattacaggcgtaagccactacgcccagccagctccaattattttacagtaaacagccaacactttaatgaaaaagtagtaccactttcctacccaggcaattaggcagatttttctacagtaatttcactcacagaggtcatgatgcaataacaaataattgaatccattatttatgtggtttataaactaacatgacatagaagctcactgaatcacctgttttgcactagaagtcaaacagtatatattctggcccttgttttctctaaagcaaatgaattcattgccattaaaatattaattaggaagaatgatccaataatcctaacattaaggtaatgtctaaatggaaaatatgactgtaaggaacacataagtagtatatagaatagaatctgaaataaattgaggatatttacaaattaaccagattctaatctgattcaattattttaaaattattttgaagtatgtttttaatagtataaatatattaaaaagaaaagctttgctgagcatgctgtttatattttgtgaaatgtcttcctaaagaagttccaagctaggctgtaaaaccaatcctgagacacattttgtttaaataaactttacttgaacttctatcccatacttaagaaaagctatgggcatattcaataacatctcatcgtatacctctttatttttcattgtggtataattgctaataaagataaagagctgctatttaatcacttccctaaaaacatcaggtttatttcagtttttcctatatggttttgtcttttctattaaaatgtcctcctttctccccctctgttgacctaaggagtctaggttggcaccctaatccgctattttcagggatcaccatagattttccatagaaaacagttggcttttattgtttgtttgttgttgttgtttgtctccagcatctcaagctcactgattctgtgagctttctggttttaatctcgcttctgctttctgattttcaatccgattgaaaccagaaatctcagagtcaatgctgggtaattatcactattctgcctatcggggacaaggttaggaattttctccctgtgtgtatttgactttctcatctctccttctttcttccccagctcctcacagccaggcctctgttttgttccctgtgctaaattcacattccagtatcgtaccctttctagttcatgtaatttctctatttgagggatttgatcccatttcttacttttatgatttctgtattatataaattagggaatcctgcctcagggaacacagtggaaatactcatttttagatttgcaagtgcatatttttatggaactcttatagttgtattcatctctgttcatctgtcctaaattggtctttagaccacttatgctaagtaggaactctaaacataggctcgataactgtgaactctttttctgcataacaacatctcaatcctattttaccttttgataaggcttgcaaaacagataagtagggaaaacctgtacacaatgaggctactattcatatgtcttatggcctttcccagtgaaagatttgtaatgatgtctaggtgtgttgagtgtaaagtgcagtaaggttcgctcaagattttgccataacacataaaaatggccacattcctactcacaatatccaaagcacttttctaagctgaatctctctccctagaagtgacagagccagtgggtgggaggcagagaattgagtgcagggtaagttacctaagaggaatggtctaaagtaggcaaagatttttgaagtacccatgattaaaattttctcttctactagaagaatattttttagtctcaaagagcctcatttataggaaaccttgaaaagataagcttatgcattttttaggctgaataactaataaaaagccgctctatacctgaccaatggcattcaagtaaagggatttatcatttaagtcaggagggaagaagtaaaattgctgagttgagtggctgccatgaagggagtgagggctttaaatgaccaaaagaagatttaacttcttccagagaacaaatgaaggtgtggaagaagattttaccaagacagaaggtgcacagagacaacctttggcgatttggcagcatttcctgggtccttggtagaaaccagtgcagagttccaaacaccggccaggttggagcttccaaagccatccagatattctagtgcagaccttgctcacaagcctgggcaggtcagcccagtttcccttgttctgatacatttagtacagcatctgtacattctatcaggtatttccttgtttgagtcccaatccctacctaccttgcccaccatattgagaaaagggaggcgagagagtaagaaacagaagaaatatagatcttccccacagtctcactcactttgttatcattaaggtattaaaagatagttatgagattttcctctcttaagaatgcattctgagaattttctgtattcccaaaggatagttatcctattattctttgaagggtactcatggtctgatttactctgtgtgtgcattttctcttctcataaaaattttcaatttgagtttcttgagggcataaagctgatataatatgtgtgtgtgtgtgtgtgtgtgtgtgtgtgtgtattcatctgttgccctaaatctccagagtgcctggtgagtgtgtatatgtataatatatatacacaaatacacacacacacacacacacacacatttatgtgtttttttccttgtctatataaataacattgaagtaagtttagttacttttcattttctaactcatttggttctccagtcaataaaggtattttccaatacaacttattaatattattaccataatcagttgagatgcaaatcaatgactcagaattgtctatcagcttccttctaaaattgatgagtacagaactgttgtatttattgatattctcatgggaaacagttactgatcagggtgaggaaaaagtgcagactaggaaacaatgtgctttcagaatttgtatctgtttatcagccttaaagtttatgttgcagcattatcctttttccaaaacccagcttagtccatgcttcccatactggtagttttaatagcttcagaagcattcttcttagtaagcctttaaatcccttatcagagctgggcagatcgtaaggttcaaatatccacagggactaagatccaactgaaaacaggaggccgacatagctcgttgtacattgttggtgattttagctgtgttttttggaactggccaaaatcctaacctttgtctcttctgagatctgatcccgcatttgactaattaaaaaaaagggctggggcattatatagttaagttgcaaaaaaagcaaagcgtgtgttccaacagtaaatgtggtctgtctgtggaacgaatataccagtagtcagttgtgtttacctgaacttatatttttcttggcattctacaaactaacatatttattttgccatttggattaggaaatggaaatgacatgaaccagaatttgtattgctggtagggaagaagtttttaaattgtatttggatttgttcctcaagattatgatgtgcagttctaactattagtgtcaaatatgacaaacgaaaattatgtgacctgcatgtgattgatactgcacaggctctctgctcatatctgtgttttggatggtttgtactcaaaggcaacttgtcccaaattatgcgctgtagatcagagtcttaacatgatgccttaagacacaggttccctgctgaaatgagattgagaaatgctgtgtgctccaatcccttccttagacttcctcagtgcatattcacatattaaagaccctaggaattactgcaggtaagaatgttgtttacatagcttaatacagcttatttttcccttagttaacatagagtgattttttttaaaatgtaatacctattaactaccaggaaaaataagattcaaaaaaattattttgggaagtgctttcccaaattgttcaacggaaaaacatgtaaaggatgctgtgagctctatgtttttggaaaggaaggcatttttgttctttgtaagaacaaaggtaaggctgtgcatgcatgtgtgtgcaggtacatgtgtgtgtactgacaagcacatgtgcattggaacatgtagtatttctcttttgggctacaataaagacatgggagtctggataacttgtgttcagtgcccagtcttgtctatctgcagtgaccttaggaagcctttctattttgtgttctcggctctaacatgggttggtgaagcctaatctgcttaaaacatctaacatggaaatcatcacccacatatttgatttcatactgaaatctaaatcatgcatacagtatcaaactttgacacagtttggtgcatttctcaagatccttcctcacctctaacttccgaaaggattagccataaatgttgacagtaggaaaattactggctcaactactttctgcaacaagagaataaacacttcctacaggaaacttttccacatcaatgatggacttgaaaagttctgcatatttatgtaagaagaggaggcagttttatcatttcatcatatatattcacaattcaatttataagaaaacatgaattaccaagaaaagtcagatcatatgttcatgttaggttataaatgttgatatatcacaatataacaagtacagaccacggtttctcaaccccagtgctattgacatttggggccagataattctaatgctttgtgtgtgtgttgggtgggagggtctgactgtcctgtgccttgtgggatctgtagctccctggcccctacccattagatgtcagtaacaccccctgccttgcccttcaccccctccccaacttgtgacagccaaaactatctccagacatcgccaaacattccccaaagggcaaaattattgccccttctccaagaactactggtttagaccttattattaattgtaaagtcaatgtattcactttccaagtctgctctttaaaaagtttatgcatgcaattagtatgaattctctgcagtaatcattgtctcaaatcctccacatattcaaaaatgccacctgcattttatattaaccaagtgcagcaaaacatagtttatcttggcctaggagaaaaattttgtcacactgatcctcattttcttcctaagttgaaagagagagaaggaaaggggtagggcctaacttttacctgtatgtagtatgcatttggattttggctaaatagttgcttaggaccaaaactcctccaagaaatttattcgtcatttatttttactaatcaaaatgaatggactctttgagtacctctgatatggtttggctctgtgtccccacccaaacctcatcttgtagcttccataattcccacgtgttgtgggagggacctggtaggaggtaactgaatcatgagggccggtctttcccttgctgttcttgtgataatgaatgggtctcacgagatccgatggtttttaaaacgggagtgagacttacctatgagtgagatccatgtgttttgtgtttttctgtgcctagcttattttacttagtataacgacttccagtaccaaccatattgctgcaaatggcaagagttcattttttttatggttgaatgatactctactatgtatatagaacacattttctttatccattcatccattgatgaatacttaaattgattccatatattggctattgtgaatactgctgcagtagacttgggagtgcagatatctcttcagtacactgatttcctttcttttgggtatatacctagcagtgggataactgggtcatatggtagttctgtttttagccatgctgttttcttcttttttttttttgagacgaagtctcactctgttgcctaggctagagtgcagtggcacaatgtcagctcactacaacctctgcctctggggttcaagcggttctcctgctcagcctcccaagtagctggtattacaggcacccaccaccacacccaactgatttttgtactttttagtagagatgggattttgccatattggccaggctggtcttgaactcatgaccttaggtgatctgcctgccttggcctcccaaagccatgctgttttctgtagtggctgcactacactttacatttccaccaacaattctaccacagttttgttttttgtttttttcatccatggataagcactgaggttgattccatgtctcagccattgtaaataacgctacagtgaacatgggaatgcagatattccttcaatatcctgatttaatattctttgaatatatactcagaagtgggattgctggatcatatgacagttcttttttttttttttttgaggaacttctgtattgtttttcataagggctgtaccaatttacattcacatcaacagtgtacagcaattcccttttctccacatccttgccaacacctgctgtctccaaatcaatatttcttaaagcgtggtgcaaattatgtctctctatgccccaagtttcctttgtgagcagcctggttttccagcttatctcctcctccccttttcctttcacaaaccctacagagcttgactcttattgctgcccacacacatgctgcacttgtccttccctgaatcggttttcttgcagttccttcctctgggaggggcccatcctccatccacagacccttgtgccaagcctttaatggtctttccaacccaatgtgctcccctccctcctctgagccccaggagatttctgttagcttttcaccttagattttgtattataatgtatgtatagtatttggtttaccctccttactagagtctacatttcacagaaaggactatatgtaaaccaactttatacttcctaacatatgtgcttttcatggacctcgttccaaaatatcaattaaataaaactgtacattgtctaacttttttttttttctaacaaggactggagctctaagaccacaccaacttgtttttgtacttactctgtgtgtgtgtgtgtgtgtgtgtgtgtgtgtgttttccttttggcagccaaatatacaaaatgaacagcttttatattaatctgagatagtgaaattaatgagaagggctgcttttgtggctctggcacaattctaaagggatcagagcaatcaccaaagggttcaactaattaaataatactacacgctaagcagcaaagctagcttcgcaaaactaatctgaaataaatgaaaagaaaatgtgaaaaacaagtgtatgacattgatgctgtaatactccatcctctctttgtccctgtctctgtctgtctccaccacattgtcacttcccaccctgctttctctttccctccttctctccttcctttttgacagatatcaatgacacatctcatttagtttctcacaggagcaatatctaagtaaccaggtataatgctatatatgtctttttaagtctaggagtttaaaactttcaaatcttgattttgccgctgaaaacaaatagagctaagaacatgttcctgatttagattttaaaaacaataataataaattaaactaaaattatcttcaggaagttcctatttctaattttcaatctaattttctgggattctgagttaagattcactcacagtattttaattcatagaatggcttttcttctcccaccccactctaatctcttcatactagccatgagatttaagttttggtaataatggaaacaagtcagattaaaaaaatgttttcttattaactgtcagatgaaggcacttgtattttccctttctatatttttgtctcctaatgtggatataccacattttcaaaagataatccaagatacagttcagactgtaatccatgttaattgtgatgacagtgtctgtgtatggtactgttatacaaataggaattagaaaacagcctcacttcacagagaattaactaaatggtgctaaaccggttactcaaagaggtggagaagtgtagagaaccactgctttcctttagctcagagtctcctttggggtgcggggagaagtctggcgccacaaaaggaattaggctctggtttgaacagagacctgaaggctattaagtttattttaagaatgtgttgccagagatctaataaatttattcgtagcttcaggcagtgcatgcacgaaatcttgctgcaccaggtgttttgttttgtattttttctcttccccagagggagaagagggtgtggatcttcttgacaaacttaactcttggtaaagcagttattttttctataacaatatagtatttaaattttttttaacttatatacaagtgaaaaataatttaaaaaattatatctgggctgctttaaagaaaataaagtaagtcctcccaaattatgtatacacatataattatacttaattttaaacacattttaaaatagtcttatgcttaagaacagtatttgagattacagcctgttaaatggaaagaccactaaaccaggagtgaaatccctgggaatttaaaatgctttgtaatcttattcacatcccaccctttctgaatcttagtgaaatggagcattgagaaaagatggaatccagcattcattctgctctaaaatgcttggcatccgtttatattattcacacacataatcatttcttgagttagtttgtgttcttatttagaatacagtgttatacttgcattttcaggaacaaataattctcagccactcatatcacagtgttaaaatgacaaaattagcttgtaatttagactccaaatgataatccaataacctgaatgttgtaaatgagagttcatgttgcagttatgtatttgctttgtcctttgtcctctgtaggtgtacacctgaattccttatcctaggcatgcataccagcagtacagacattcattccactaagtgtaagctcccaattaggaaagtacagtgttacccaattaaatcaggtttgatgaaggaaatatgcttaaactctaggtgaggggatgtaaattcatgtttcttccttccttttcccccctttttgttgcaggggatcaaaattaacacattctttttattttattttattttttattttattttattttatttttgaatggagctgggggagggggctgtgcttagagaaatgcagaggatccctgcaggctcaggcttgcagattcccattccaacctggctgtggcctgatgatgcacattagtcagcctggaaggaggattttccttctagcttccctggattttggctttggctccaaattaattcatcaaaccagagggtcttaaatcctagcttgcgttaattttttataaatccatctcaaatatttattaaccggctttcataccctttgctttgtcacataatacttatcatttgagggcctcactattcactagaatgagagctgatagtagagggaaactcactcggatgacagttttgcttctttccaatagcactaatttataaattaagttaagcaaattagaattaagctagaatagcctgcaaataggatattcacctaaacaacgtcaaatgaagactcagaggaagtataggaataatattagcaggctgcacttgaatgctacatctaccacatactacaccccttggaatgtaaagtgggtagtttaatctgacactgatttacctcatgcatagaatgtggaaatacctaaattgcagggttgctgtgagatgcattgagataatgtgcgtattatcaaaatcaccctgaccatggccctcaatctgtccagctctcctctgcaggcattttcagagtcgccaaggctgagctgaattcagccagtttatacctgcacttgagttccagttgtttttgatgagtgttatggtttctcttttttgtgttttgattgtccaatgcctatattatgccagttctgattggtcaaagcccatgccactggttggtcaagatgatgatgatgatgatgatgatgatgatgatgatgatgatgattattattattattattagagatggagtctcgctctgtcacccaggctggagtgcagtggtacgatctcagctcactgcaacctctgcctcccaggttcaagcaattcttctgcctcagcctcctgagtatttgagattacaggcaggcaccatcacacccggctaatttttgtatttttagtagatacagggtttcaccatgttggtcaggctggtcttgaactcctgaccttgtgatctgcctgcctcggccccccaaagtgctgggattacaggcatgagccaccatgcccggccagtcaagattatttttaatatcacttctgccccaaggataggtgctttccatagtaaacccagttgcccaacatctgcacagctctactagaaatcctatcacagctatgcccaactcccccataggaggaaccctccctgtggccccaggaacccccaggggtgggccacataactgtgtggtgatattttctgttattctctattgaaggaaaagggtatccaaagtgtgctgcttggcccctggtgtgaaaaagagactaattaagcatctctttaaatttccacttacactgctttctttccctggaatccaaaaatacatccaggagcctgggcaagaattagagatgaaaaaacttacactacactttgaatccctacactcagatgattaaacttttctatagagtccattattttgcctgacatccattttcattaccacaagttctctctccacaggctcctttatagcccaagaaaatcagcttccatgaggtctgtcactccagtttcccacctaagcacaggaagatgggaaccccagatgtgggctgttgcttaaactgagatcctagaatgaattatcctaaaattgtctagtaggattaggggtgattcttcattagaattcattccatgcatatcactttcccgtaggctaacaacaatcctacagattttctttgtataccctcaaattagcaggtaaccatgcgggagccagtacacccttcacccccaagccacagctgtgtctacatactaatattgtcatggccagggacagatggctggagggaggccagagctgcccatctgagaatgcagtgagggttcctttcaattcacactcctgagcatatgccagaaaagggattgattaaagcaagacaaaatgtgtggggtaaacatttttctgctcctgtgctccattatttttgagtccccaaagaataacctattgtgacttttactgagtaaatacagttgattttaattattcagcgcagttacgtttccgtaaaatcacagtgaatattgaattagcaaatactgaagcattgctcctaggggaaatacagggttaggtttctatgggcctctggtcacatttcatcaaccaatcaattataaccttgttttatgtgtgtttctatttaaagacaccttattaactatatgttgttgattcattaacacggcacactcacagtctgaacaaaacttatctagcacacgaattttctttgcaaggcccatcacagccttcttgttcttaggaacgccagacactgcttcagcactatggttggggacctttttttttttttttttttttgagacggagtgtcactctgtcgcccaggatggagtgcagtggcgcgatcttggatcactgcaacctctgcctcccaggttcaagcgattctcgtgtctcagtctcccaagtaggtgagactacaggcatgtgccaccatgcctggctaatttgtgtgtgtgtgtgtatatttttagtagagacagggtttcaccatgttggccacgctggtttttaaactcctgacctcaggtgatctgcccgcctcagccttccaaagtgctgggattaccggcgtgaaccaccatgcctggctggttggggaccatttttaaaaatagcaaaatcaccaacaaatagcagaaaaatatggaaaatgtggcactaaaaaaactgtgaataggatacttctttacagcatgagagctgaaacaaagcacagagtgtcaggtgatgagaattttttgatgcccctctgcacgtgtctgagaatgattacaaaagtaccaagtgtattaatttgggggctaacataaattttcatgagtagagcagtttgtaaatatggaatccaggaataatgagaatcagccacatattagtcttttgcatagtagatgaataggaatttcagtctttggaaacttgtgtacaaatacccattatatacccacattatatacctgggatgggtatatatgtaaccatatcatgtcctcaaggaacaaaattacacatagtaatgtggactgtgatactcttggcttgtaaggtgaacattgatatatttgtcagcacccatctccacctccatgtaatctggccgttgcttgtctgaatattgagtagagtatgaaataatccacacttgatctcaattcagtgtagtttgtgtgacaattactaagatatcatagcttcatttattcttttgtgcttgtacatggctatcctaaaaatggcccaaaagatcactataagctgtgtgtgtccagtggaaacccatgtgtgtcgtggtgctgtgcctgtttccctctacgtcctgggtctttgtcatgccactcctctttttttttctcttttttttttacatgatgtcttgctctgttgcccagtctagagtgcagtggtgtgatcttggctcactgcaacctccacctcccaggttcaagcaattctcctgtctcagcctcctgagtagctgggattacacctgccaccaagcccagctaacttttgtatttttagtagagacggggtttcaccatgctgttcaggctgtcaaactcccgacctcaggtgatctgccttcctaggcctcccaaagtgctgggattacaggcataagccaccacacccggtcccattcctctttctctacatttctctaccaagtctccatatttgtttgtgctgcctcattttcagaatgtgttaggcaatggaaatggtgaggagggagtgttcagaaggaagggagaaaatgatagaacaattatcataagcagcaattcttgaataccttactattggactaatcattattgaaattatcaaatagtctaaagcttgtcatccctcggtgcctgagtcacctctggatgatccagggtgggctgcagatgtatcttgaccttgccttctttgtctctaatatccaatctcctaaataggaggagaaggaattaaatatttagtaaatgtcctagtgcctaccacattgaattctttgaagttcctttttattttttaaaccggatttcttatctctcttcttatacctaatcttccaggaacgccttcccctccatctctctgaatgtctaaataccaccctgtacttaagcccccatttaaacactatctcttccatgagtttgtctttgatcccctcaggctacagtaatccctcactcttgtgaactcccacagctcattatcagtgcctctcacagcatttgccaggctctagtttgtgcacattatctaggtgcctgtgccatctcccgcagttgaatgccagcccctgggggcagggtaagagccaagtcggcttcagctctgcaccaggtggttttcagcaaagagtgaagtcagtctgactttaggggccagaggacaggattccacaagctcgaggagattctcctatggaagattctgaggcaatgcaaagttcaagagaaggtaatcctatcacggaaatggcaatgaaatgaatcccttattttaactttaattttagatcttcaccataatcactagcattgatttggatggtagctgcatggttgctaatcaccgtccttgctgtctaagagaacaagacttcttaaaaatctgcttaaaaatcaaattatctgcccagtgcagtggcttacacctatagtcccaactactcaggggcctgaggtgggaggatcacttgagcccaggagtttgagactgcagagagctgtgatagcatcactgccctccagcctggtcagcagagtgacaccatgtctctaaaacaataacgaaaatcaaatgatctaatttccccaataaggtaggtaataatattattatcttaatcttttctcatataaatatctatatctattgctgatttaaaggactacatccagcttttaaaaatttctgtagagttgattttcaattcagctttgaagctgaactttattctgggcaaatgagattttaccaagctagaaattaccaacaatattttctatttgtaactattctccaagaagaaatttgttgtcaaagctgaatggacacgtcccctttatcaaatacaagtcaaaattgtggcactagtttcatattattgaagattaaatgctttgtctttagagagatcgggcagccctgagcttttagggagggctaattggagtttggtattctttgttattctaaaaaaaaaaaaaaacgactgagtttgaattgaagaaaatgaagaagtctaaagaccagctggataagttcaaaagaggtcttttcatcaaaaccttaatggctttggtgtcaggatttgaagacagagcatttgggagtgtggttatcagctgtcaggcacctgttgtgtggatttatgacttgagtcatggactttaatttttttccaatgaggtgctgagactagctcctcatgcaccatagatgacagaatctattttagaaaggcaacaaattttgtttaagtaaaaatttgtcagtttttaacgttatttaacttcatctataatttcacgttcagtaagctgtagcttttgttaaagtgccaatgtttattatttccatgaattgaggttttagaggagtttacgtgataggtaacaaattagtaaataaggtatctttctattctttcaataaaatacagagttcaattatacaaggtcacagttttagtaaagagagttacaataagttacagcttggttcctcaaatctctatatcactcttgcgtaagaagtgagtacctaagattttacaaattctgaaaccaaatctgattcacatgtgtaatgtacagaagagttatgtagtatttaattccattcagatttaagctttatagactgcatattttctagttaagtatctgtttcatttatattctctggtttaaaatcccagtgttagtgggaattctaaattttctatgatagttactttgggccatctccctgtcttacaaagcaaagcttctttatattttttctgaattttattttgaagtaaaatctcaaggtggtggttgtacatatgaaatactagcaaactgttcagctatgtgtcattcgaaacctctgattaaccagtaacctggcaacttcgtcctttcagaacataggcacaaacctgaaaataatttttacagatatataagtagagatgaaattaggtatctctaaaaccatccacaaaggaagtggaagggttaaatagccctttagtcatcaataatccctgggagtgtcatttagagaaacacaaattccaataattcacatttatgtatcacttaaaatctttcaagaagtatgcaaacattttagaaagagtgtcattaaaccaattactgttttttaataaaaagattcagtaatgaaagagatatgttatgtttacatagaaaatttatgttgctcaataaatgaaggaccactaaactttcagccaagacattagagtttctaattgatgcaatagatgtttttctaacaataagttaaatgagctcccagaactcctggatcatgtgttgcagtgggagaacacagaaaatgacaaaaaaaaaatagtaaatatatataggatataagattttggaaagtaccgtagagaaaaactaaccagaataaaggggtagagagggctggagtttgcactgggcttgctgttttataaaaactgaaaagagaagccctcagtgactcaatattcttaaaatgtgccatatttagaagagaatgatattttctggaatatctcaggaaagggttagaatcaaatcttaaaattagctaagaattgttaaaatttagaggaatagggattcccaggaagaggagaaaaactaaggatgtcctgggcagaagatacagcacatacaaaaacagccacctttgttcagaaaagagtgagaggttggatgtgagaggatggatatttctctttaaggggaagtgataggatgtgaagtcataggtgttagaatggacaagaaaaagcttggtagagcatgacaagaagtttggaatgaaacctaggcttgctgggaccacagtttaaagtggacaggagtgtggcataaaggtgttttcatctgataatttgttttgaaatcagagctgttttatgtactaatttaatcaattgcatgttattctatcttttctattactttctagatgatgttccaattaatggaacgtaaacacaataattttttaaaatattttttaaaaacaatgagaacaagtattggcaataatgaaagaatggatactgtcaattattgatgtaaattagtacaatttagtacaattagtaaattaatacaattaaatatgagaggatacccactaaagtgcacaactatacagagtaatcaataagagaacagctgcagaaccacaaagacatgaaagggctggagcagctgcagctgcttcacacaggagggggatagagcagcaataaggaatggaaagtgtcagccaaggaagaataggggtcctcattttaggcaagaggacaagggtgatggaaagagtgagggtggcaaatcccaggagctgcaagaatcttggcttgacctccaaatgggcagattagagtgcaaggggaacaatcagggtaggtcaggatgaacctggaaatctgcaaagaaaagtccacttgatatgggcaaaagctgtaggcaagaggggcaaaggagaaaggagcacaggtgggtgtaaggcagacgaatagtagtccagcagtgggcatgcagggtgggcttgggcatgcgtggcgtggcagggcagagtgagcttgcatttgttgaatgatactattgacctcagagcactgtgtgtgtgtatgggttacctgagtcgatctttgaagaaatcacaggcgctaattagcgtcaccctcacctgactctccagaaaaggaaacagagatccagagaagtaacttggtcagagtcagacagcagctagaagtgatgtgggtgggccttggactccagttctgaggagcctcctagcccatggcctctcctctccagaacagcactcagggtgcagcagacattgggcatagtaagtttagtaagtttcatcagcgcaaaatgtggaatgagtttccttgttaaacggacaaactgacacaaaattcctgctctccaatctttttttttttgagacagagtttcactcttgttgcccaggctggagtgcaatggtgcgatcttggctcaccacaacctctgcttcctgggtacaagcgattctcctgcctcagcctcccgagtagctgggattacaggcatgcgccaccatgcctggctagttttgcatttttagtagagacggggtttctctatgttggttaggctgggcttgaactcccgacctcaggtgatccacctcagcctcccaaagtgctgagactacaggcatgagccaccacgcccggccccaatctatttatattttatagttgataaattaactaaaaataggaaagtccataatcccatcatttaaaacaccaagcagcttctcctgtatcatgtctcattttacgaagctacattcacagtatcagtaccatttgttgttgtgtttttaagtgttttcggtgttccaacaacaatttcatatttattgtttgggagttgaataacattttattgatttgatacactataagatagtttttaaggtttggggttattatagaaaatattgcaatgaatagttccttacaaatatatttctgcttctcttaaagcaaaaatcccacagaaggagcgacaagattgaaggatataaccatctttttgccccttgcacacattggcacatagctgtccaaaaggcttgtgctaatttgaaagccaaacaacagtaaacaagaaaacaatttccctacataatctcagttgtacaaggtattctctttaatctttagtacctgttaagttgatagctcaaagttgctgcagtttttattttttaaaagttcgagcaaagatgaatgtattttcatgtcttcgctcactcagcgttttcccttgtgtagattttttttttgtcgtctattaaagttttgagattttcctctttcatttctttttctatgtgaactgcaaagagaagaaactagaatgaaaactgtgcctctagctgtgtttgttacttgggctttttttttttttacaccctctttcagaaagacttaaaaggcattactgatgcctttgtttgtaaacctcaccttactctgaaataattggtgtagatcaaaggaagtagagggatgcgtgcagagtgatcagctgataaccatttttcctttcatttacccaacatagtcgctttcacattagagagatcacacacaaggtttattttctgctgataggcagcccactccattttggtgggaagatggaaggggaaaaccttatcttcagagtggaatggaaatcaatgaaaagaactgtctgtttgctctaaggaatggagtggaatatagtggggaagggaggcggagaagggatatttgtttttccttaagtggttataattaaaaccttccacccaattgctctgtgaaccggaaaaagtatttgtgaagttgtgtgtgtgttttttagaacatcacaaaggagccttgcagccctctgattagaaaacttgctctccagtggcaccttgtgggaagtgagttatcctgcaagttggatatttagttttaggattaaactaaatagcctctggtagttgtgcacttcctacccattacctacttcccctcctaaaacagcaaggaatttgtgaagaattatgtcagcgattgaatgtatgtgtaacagtctctagactgtaagctgtatctccatgtacatattccagagttgtgtatcaaactaagtagctgtattgattgttaatgttgtttcattaaagtaatctgtggaattttgaagatcactcattcaagaaagcactaatttatggctttaaatttttattttcaaggtggaaacaagttaacgtaccagaattttcgtctgaattgggcatggatctcctttgaaaaggaatattacctggtcaatgaggactccaaatttctagatgttgttcttaaacgtagaggttacttgggagaaacttcttttataagtaagtttaattttttatttctgttttaaaattttatttttctagcaaaggtttataattctacagtgattaaagtatcagtttagttcacttagagcttaaagttaaaatttaaaagttctctaactgctaaagaaacaagcaacaggtttgtgtcaaggtacttatctcttcaagccttctgtgtacatatgatctttttctggtataaaaattggcaggaacactaataagttacgaaacaaaaataaatgtcactagatcttagaatgagcttaggcaaatctgtaatttacccgtaagataaaagttttctgaaacatgagtatcgtgacctttctttgtaacaacagtaaattgttaaatactaatgattttcttctgctttacttcgtttaaataaaactaagagtcagaagcaaacgaatgaaaccttttttcaactccaattcaagttcatatttgttttgttttgtttgagacggaggctcgctctgttgcccaggttggagtgcagtggcgtgatctcagctcactgcaagctccgcctcccaggttcacgccattctcctgcctcagcctctcaagtagctgggactacaggtgcccaccaccatacccagctaattttttgtatttttagtagagacggggtttcaccgtgttagccaggatagtctcgatctcctgacctcgtaatctgcccacctcggcctcccaaagtgctgggattacaggcgtgagccaccgcgcccggcctcaagttcatatttgattttcatagaagcataaaataaagttggcagtatattggtacttttaagcagcaatatggttggcacaaaatatttaatatgttgataaaaatggcagcacctgaagcaactatattgtttttggtaccatatattttatagacatctagaccaatggaatttgcatgggataaaaagagatttcattgagtgagattatcaactaaggtggcaatctgggaaaatgttggcaaagtaaaaagttagtaaacctatgcttgtctccaaatgattattttgaaattttactgggtccatgaacttccagatcctcaaagagtagacctctatgcacagaaatacacacccctgccacccccaacatccctccctgacacccccacacatcccgctgtaattttgctgcagccagaaccccaccactctttttgatttcccctgacatgttttgattctgaatattaattaccccttacttttaaaattctttttttttccttttaactttagaagaccaggttttcacacgacactttccctgtctttgaggttgctctggttgcaggggggctggtctccccgcggcctcacccccagcctctgcttccatcttcattttgcatgagcctccacctggctgtgcttctcatgctttgtatttagcctaggatattctgagcactctcactgcgctctcttttagggacatattctctgtgcacatgtgcacatcctgtcttatcatcagggagtgattcgtcttaactctgctttgtacttgaacatatagcaaataaatcatggggaaaatgataactaaaaaacagagcaccttaccgattattaaaaataggtttatctattttttacctgagttcccactcctggtgagtttatttaatttttcactcacaacaggcccctggataacattgggaaagttaacagtagaaaaagattgtaaaattatttttttgcctttttttttctccactgcctcttttttcttaagctggatgccaaaatgtcaaacaagagctctttttgttgttatttttttcaatgcactattattttctacgaatgtggggttaacggcagttctacaaaggctcataggctttacttggttcacttcacatggttacttagtaacctggggtgatagaaaattgggaagccttctgtgtgtggcccacatccttcagtcattgaagatggtaacggaattcatgctaggacctggaatggaaaccagattaaaatgaagggtagcctcatacaagttttacaatgaatacgttgcttataactgtgcccatacaacctctgcttttatttatggacttttagaatgagatagattgcattatagcaaaagacagagtatcgcttgagtacagctaagaaaccatgaattactgaaatttgtagatgtatattctcaaagattattattcattttataaccactaaaactaataaactagatatgtatttatattccacattagtatatgcatttcaaagctcttattgctaccagttattgaatatttattaaaggcaaggtacttcatacgtacattaagcactttatctatctcttttataccttacatccatcctttattccctgactcaacaaatattttattgagtactcattacataccaggggctgtgttaggtagtgaactatgaagaaacaatgatagctaatgtttattgagttatttgctgggcctacttcccaataccctacctaggtcaactccatgagaagagtaccatgaggtgaggaaatagagaggctgtgacatgtttaaagttagccagctagtaaggggcagagctgagattgggcaaaaggcccatgctcttaatcactgcaccatagtgcttcataaatcctccactgagataagttaataacttgcctacgatcccacaactgttatatggcctggatgggatataaaatctattctctccttccacaaacaccctgtttaaccactttgttatttttctatgtcagaggaaaagatccaattgcagtttcatttaataacaaaagtgaaaaattataggtgtttttagcagcaacaattgggatatggtattgcaactcatttaatatcagatggtattgcaactcatttaatattagatggcttgactatcgtgcaggaaggaggactagttggaactagcagacattcattgtatcacacttactcaatttttatttttaactcccttttgaaactccaaaaaaaacaaataatgcattgctgatgaaagaaaacaaaacagaaaagtgagcagtagctatcagaggcaaactaacagattttgctggtgatgccactggggatagatgggtcagtgagcagcatgtgttctggaacctcagagagaatgattcctttcatcagcatcttggcagtgaattgtagtggatccaagaggtgctgacaaccaactctgtgtgcacaaggaaccagagagctgtcaggaagtctacagcattcaacaagatatgcagccctgcaattcctggttctgtgcccttttttctcttgccattaaatgaatcatgttttacctgctactgtaaaagaaaaatatgatgcaatatttatgttagttattgttctgagatctgtaagacagaaatatttttaataaaatctttttcatcttcactttaagattaaaataacagtcattgatatattcctatatataaatacatattcaaatgactcttatataagcactacgaaggcaagagtttttgtctgttttgttctctgatacagccccagcacatggaatagagcctggcatggaataagtactcaatgaatatttgtggttgaatggatcttatttagttcagtttcatttctagtttgaagaacaaaaggaatttttcaaaagtataatttttaactaaatgcaaaatcttccaaataacttattttcaagatttaaaaaatctatcacaagactttatttttccctcttttatttatttatttatgcatttatgtatttttaatttttgaggcaggctctcactcacccaggctggagcacagtggcataatcacaactcactacagtcttgacctcctagggctcaggtgatccacctcagcctccccagtagcaaggactacaggcatgcgccaccacacccagctaatttttgtcttttttgtagagatggggtttcaccatgtttcccaggatggtctggaactcctgggctcaagtgatccacccacctcgcccttccaaactgctgggatgataaacctgagccaccatgcccagccttatttttccaactcttttacatctgtctgtcttacccacttctctgaaaatgctcaggtttagagaaatatatttgaaaattattctattaacttgactcattaagaggttctggttctgtatttaaggatatagaagtccaagtaccattgccgttttataatttttctatgacattgaatgttttcactgcttttggataatgtaccctatggtttgagtacctggcatggtaataatggagatcatcttgcgatgtagttagagacccagagatccttcaaccttcccagctaactgaaattgaccttgaatgaactaccagagtaagccaagcatactgctcataataaccatatatatttagctctccaattctgtttatttaatttcatggaattctggggtgttccagaaagaaaaattttgcagtgaccatgttgaaaaacactgaattacattttttaaaggatcttagttccattaagtgcttagagaatactatcactttttattattccacttggccatttatgacttagattgtgagtcagagaattctttcatggaggagtttcttattggcttatattttatagttagagaatgtttcttattttttttataatatccaggaacacatgcaaaagtaaatgtgaagagttttaagattgtataacttgtaggagtaaggatattgaacaatgtgaatatacatttacttggtcttgtttgacaagaagttctaatccaaatgtagcttaaagcatatatagcaaaaccataattgaggcaaaagcagaacagaatcacaaactacccaacacctacagtgaaacactttcatcatcagacccattcccaattttccatttcatgaggtcaaagcaggatcaactttgcttttcaggataaaatgacatgcaaaaagttaacaaggaaaatcttaataatccaagcgaaaatgaaactaagaaaatgatattatgtttttgtgaaggtattggcacaagagacagaactgcagaaaaagacaaagacttcaagggcaaagcacagaaacaagtgcagttcaacccaggccagaccagggccacatggcgagtgcggatcctgagtgatggggagcatgagcagtctgaaacctttcaggtggtactctcagagcccgtgctggctgccttggaattccccacagtcgccactgttgagatcgttgatccaggagatggtaagagccatcgtcaactggtttatgttgttgctgttgggctgctatgacaaaataccttgtaggggtatagcttacagttttaaattcaatgtttgaaatttccatagagagaaccttctagattaatgattcattattctcagatgtgttgacaggaaaatggaaactaaaaagtaacgaaagaatgctatatatgtataatatgtataatatataaatatttatatagtatatataaattgtattaatagattttatgtatatataaacataattatattttccagctagtacaattttcatattaccagaaaatcttttattttatgtatataaattatttacatattttatataattttatatataaattatttacatatttatatataattgaatatatatacacatatatataaaatcgtttgtaaagacacggtcttgctatgctgcccaggctggtctcaaacttctggcctcgagctatcctcccaactcagcctcccaaagcactgggattacaggtatgagacactgtgcccagccagggatgctatacttttccaagtaaatgaactacccatagaattaccaacatgttcttcctgttattataattctatcatttaatattgctcatgtcatttttaatgaattaattcatcactttttggagtcctttaaatgtcttaacatatctttgaaacaaacggtttgagaatgagatcattcttgaattaatgtgttccccatattacttttaattattcaagatttctttatatatttaccagccaaaaatttttatttggccatatgtttccacatttgtggcataatacccaccccacccacccccattttgtagtgaacacagtgttttgaatcattgctgttaatttctgtcagattacattttcttgtcaatgcacaccttggctgatgctggtaaaagtgaaccttaatgcttttgtgtgtaatttgacctttttattccccgtcatacttctacagtcctggcttgtcttgatctagtcagaaagttttaaaaagaaaaaaaaagaaaaagaaaaaagattgaatagctttttgagggctggcatttatacaaaccgtatagaaacatctaaagctaggatcctgtcagaagccagacatgactttcttttaaacttccagcctactttattttgtcagtcagaaaactcttaaatggtttgcaaagatacaatctacagagtacatgaaatggagacctgtgtggaaatccctgtgttaaaagactaagcataattaaagaaagtgaataagaaaactggagctctgacatcatttgtttaactaacaactctgcctttagttaaatatgaagttcaattatgtttgtaattttcattaaagaatagttagcatttacttacatttaattgtatctgcattatccagagataaataactaaactttcttttggtcctgaactttgcacatatgcttgaaaaataaagcttttctcttttaaacaagcccaggacagctttaatacatataaattgactcgttagttaaaactggaagccattttttgatatttcatttcccaactagtacaattgccgtattacctgaagaaataagacacttgaattcatttctgccttcctatttataagctcagagtgacactctgcacccatgatatatctaagcagtaggatattaaaaacaaaacaaaacacatacgcacaccccacatacacagccccccacttatataatcttttcttagtgtaggctataccaaatgaaactttgccataatttcatttcatgtattgataatctaagttgtttcagaattttatagataaaattcagccctgtttatttcaagtcatgaaaatccttggataactgataagtcttccataatgcttggtatgctctgtgccttgttgaagaccattggtcttgaaacccaactctatttctagttgtatgacctgaaataaaacagcttttaataaaatttagtttcctaatgcacaaaataagaaaaagtaataattatcatgttacagcattcccatgaaagagttctataaaacataaagcagaatgcaaatattcttacttctaacatcataaatctaatgttagatttcattttaagaaattgagtattttttttcccttacaaaggatcacttttccccccatttaaaaactttgtttccttttgtactctctctccagctctttgcatataaattcacctgccctaggagccgttatgcctacaagctctccctctgcatattcattctaggacatgttatgatgttttgttttcaaaattaaaacaaatttaaaaattaaaattttacattaaaaatttatccagctcatatttgtgctgggtacagcactatatattgggaatgcaaagataatagcatagaatctctgctgtcaaagaccacaggggatgggaaagagagccctttaacttatcacagcagaatgtgatgtgataaaacaaggtatgaagagtattgggacgtttagaagaaggaataaacaactcggctttattttaggctgggaactggttttacttattagcaagtttatgtaaacatatgtaagtctatgcttttctcattactttataatggtaacgactgaaattcgttgagcagttactatgcaacagacagtgtgtttagcacattatatacgttctctcattcagtcccttgtagacatatgaaccattttaggcattttacttgatgtttacaggaggctttcaattttatatttggcaagttttggaacattagttccaaaattatatgacaaaaagaactttctttttttctctctctctttttttttttttagacggagtttcgctctcgctgcccaggctggagtgcagtggcgccatcttggctcactgcaaccttcgcctcctgggttcaagcaattctcctgtctcatcctcctgagtagcctggattacgggcggttgccaccacgcccggctaatttttgtatttttagtagagacggggtttcaccacgttggccaggctggtctggaactcctgacctcaggtgatctgcccgcctcggccttccaaagtgctgggattacaggggtgagccaccgtgcccagcccagaactttttaacacacacacagacacatatacatgtattggcttctcacattttataattatggtcttacaatgccatgtatccatatattttttaaattatatagttgttatataggtgaagattttaaatgactatgtattttatttaatacatcagtgtctacatcactgaaaaagtatcacatacagttatatgcttgcttatttctttaacctggtccaatactcagtgccctcatggatatactgtaatacctcaccccctgcccccatgcctccaagtgtctgtggctctctggttgggaaccatggctctgcgatcaatagagctgaccctcatgtaaagagtgagttcagtcactcattgagattgattctacagtctcccccacaccccctttttttttcgagacggtatctcactctgtcgcccaggcttgagcgcagtggagctatcatagcttgctgcatccccaaactcctgggctaaagcaaagctcccacctcagctttccaagcacctagtattagaggtacacaccaccatgcccagataagtgtttccttgtttcgttgtgtttgtttgtttttttgattggttgttttttttgtagagacaagagtcttactatgttgcccaggctggtcttgaactcctggcctcaagtggtcctccttggcctcccaaaatgttgagattacaggcatcagccaccacacacagcctcttcttgcttttaacatgcgcatagaaagttccaactgggaagggtttaaagttcatgaaacatttaactcattttctggatgaggaatctgagaaatagagctttgaaaacttacctcatttaaaccttatgtttataactctgtgatttatatatcaatttacaaagatctctgagggtcaaggaatttactttccccaagtcacccaactaataagtgccagaggcagtatttaaaaaaaatatgtataaaatatataataaaactaaacaatatatattcaaatatatatattgtttccccctctagagctcttctttcccctgagttatgttcttctatcattttacatggttagaaaagaagtaatatcccaaatcctaattaatcagtgaacttatcactgtgacgttgttttacttatcttgtatatgaaaacaacacagtaatttcttcccgtcttatgctcttctcttttctctttctattatatattaagcctcaaatttattatataggtgaataaaactaagcattctaagaaaataatcaagaccaattcagctcctgcataatgtgtctgtatattcaacaaatgcttattaaacatctactctatgccaggaatgctgctaggatctaggtagtagagaagaaggcatactaacccttgaagttaatcatataattaggtgattgcattcccctagattgttacaattaacaatatagaatgctacgtgctctgataaaagagcaactggagcccatagaaggagtatctatggagtatccagtcttgagagagaaggaaaggcttctaggataaagattcttaacctccgtgtattaagttactaagctgtcagaaattaacactatcttcccttgctctttaaagcatatagatattagttaatgttaaacatttccatttttgttaagggaaaatatacaagagctaagacgtctgattttatataaagatcccattcttttttgacttagtaatttctagccagagtaaatggagttctatatacatttattgggagaaaacaacctcaaatatagaggtatttgaatacagatacttagtacaggtacctaaagcctgtaatagtttatgtaattatttagtttgtacacttgaaatgtctgccaacttctgatagaaactgagtcattctgatatttccatgataccaaaatatggccaggaaccagtggattaaatatttgatctctgtaatcatttctggtgggcccatggcaggttaatgccatataatatttaatagagaataaacacattattttaaaggaatgtagaacttaacattaaaggttaaaaacctaatattaatgagtacaaagaaaagacaaaaatctgtattctgaatgagccaaaccgatttcatatgatagaattcagatgacataggctgactacaatatgaaactcaaacattcattcttatttttgaaattctacacgttgtcagtgttgacataaggaggtcactggctagctgatattttgaggtgaatgtgccaaaattcaaggtccagaattaatgaaacgatagtacgctgcagatgatgatacagaaatgataaagcaggcatgagagagcttcaacttcagtgagagtcaaaccattttttaaaaagaaactatcagtgtgaagcataggtcgtcatcttaaggcaaacaaaaaatttcaaacacttgctaaaagtatagcacatagtttctgacactgagtagtggataagcaaaaaaggtgcaaaataaaacttgcatcatgaaaaactttctggaaatttctccatttacaaaacaaaaacatttaataattcaaacaaagattaccgaaagattcactttatttacttatttatttagaggcagagtctcactctgtcacccaggctggagcgaagtggcacaatcttggctcactgcagcctccgcctccccattaaagtgattcacctgcctcagcctcccaaatagctgggattacaggtgcacaccaccatacccagctaatttttgtatttttagtagaaacggggtttcaccatgttggccaggctggtctcgaactcctgacctcaagtgatccgcctgccttggcctcccaaagtgctgggactataggtgtgagccaccacaccttgccccaaagattcactttaaccaacacatttgtatagtagtaccaaaggataatttttggacctcatgctatcttgatgtgaactcatagcacttattatcatgtggtttgggtatgtttacattactttatttctttttcaagaccctgtaaaaattagtctatattactatgtctgtcttagagtaaaacaaacaaaccatagaaatgtaagaaagctgtccaagttcaaatagataaatgacagactctgctgtattcaatgccacttgttggccagtctgagggcaccatagtggcctgaaaatgcactggaatctggaatgtcttctgagttgtttttgaatgtgccaaatttcttaaaggcaaggaaccatcagtgccttcatccatgtactctattttcttttcctttcttgttctattatagcagatttttagaagatattttgttctatcattgtttagcagagtctgtttattttttatcctctgtggaatataattgagagaaggtataaaatgtacattctctttcaaatgaagctacaactactttatgtctgagaacagagaaatcaattttgcctgttgtagcacagtcaaaacccaaaaataagaactgcagttacaaattgcagtactcattacaatatagtcacatggactaataaagaatgcattcactttactctttctttcaaaataaagggtaattaaatcaatctggaagtataaaagtaacacatgttcattgtcaaaaacgaatacaagatgttaataatggtggaaaatgagagggagtgaagggatatatgggaaccatatgcactttctattcatttgtctctaaatctaaaactgctaaaaagaaaaaaaaaaaacccagaggtctattcacttaatttcaaaaagtcatttgcagccttaccacttgagagtaaccattgttaacatttgagagcacgaccctgcagtcattttttttctatgagagttgactatttctataatgtagcccttaactgtctctcagtgaacaccttcacaaagacagcagcagttccaatccaatgtgttaatgggatttgacatgtgtacttttatattatgatatacatatattatattccatatacatactaatatactatatactttatatactttttcataatacttgtgaagatttattaatatgcatattgtacatatattataaaagtatacatactttttaaattgtgtatgtatacaatcatatatatataatttctatgaaaatactggattttaaaaagaattctcaaaatatttgtttctaacttcgttttttctgattctactgcaatggccatctctctgccttagcagtacttcgtgttgctcttttatcatctcaatttagccttttgtttttctctggtgtaagtgatgctcccactcctggctaacctgagcagttttctcttaggcagtaatgtgtagtggttacgagcctgggcgggctctgacatggagtttctgggttgaaaccccagcatcaccacctaccaacctaactttcagctgctcacttaacatacgtgtgcctcagaggtaaagtgagtcataataattcttacctcaaaggttgttgcaaggataaaactagccaatcatgtgaagtgtttagaatagagcttagcaaataatgagaactccatgcctactagctaagaatttttaagggtagtctacaaatgccacttttaggaattttgcacttaaagctctatgcttacttgaagcagcctgcatagacacttccattgtatttataacgtgaagttgaaaaggaatgttaacagaaaaatctatcagggaagcctttctttgtctctgtgatacccttttccagtttttcccacagcctacatatttctgttagaagttaggtcaacagaagacctaaacttgatactgggcctatttactctgtcagattgactgtaggagtgaattccagagcgaagggcacagcccagacactcggttttcttttttattcctaattcaaacttactggcactggcaagaagtcctggcttgtttaatcaaacctgcatgtgtcataaggcctaggaagaatcaaaactcaggtgcttgagctttaaatctttaaaaagattattaaattaaaatcccatacatggaccacttctgaataacttatttgaaaagaaaaccctggccagtatagattagaagtatagaatgaattatgaataatcaaccctgtcttagtcagctcaggctgctataacaaaatgccacagactggggtggcttaaacaacagacatttctttctcacagttctggaggctggagaatccaagactggggtgccagtagatttggttcccggtgaggggcctctttctggcttggaaatggctaccttctctctgagtcttcaaaagacgtttccttggtgcatgctcatggagagaaaaatacctctgtcttcttcttcttataaggacactaatcccatcctgagggccccaccctcatgacctcaccaaagtacctcccaaaggctgcatctcctaataccactgccttggggattagggcttcaacatataatacaggacgaacacaaacattcagcccataacaaaccctaaaggatgagaatagatggacacatagcgggaaacaacacacactgggcatttcagaaggtggagggtgggcggaggaagaagatcaggaaaaataaccaatgagtactaggcttaacacctgggtgatgaaataatctgtgcagcaagccatcgtggcacacatttatctatgtagcaaacctgtacttgtaccctgaacttaaaaaaaaagttaacaaaaactctaataaatcaaactttctgtaatatttcatactaatgccacagagtccatgacctgaagactgccaaaatctaggtgataccggagcacatttccataagttaatgaaaacaaactcactaaaactaattgaatatttgacttgaattttcagtgatacttggtgtattatttgtactcaagtcttatgataatttctacattgaaattttatatttggtgaaaaccttacttcataataataggtgtaattcttgcttttactaaaactcatcttaaaaataaaccggcattctcagcaaactaacacaggaacagaaaaccagacactgcatgttctcactcataagtgggagttagacaatgagaacacagggacacagggaggggaacaacacacactggggcttgtcggggggtggagggaaaggggagggagagcattaggacaaatacctaatgcatgcagggcttaaaacctagatgacaggttgataggtgcagcaaaccaccatcgcccatgtatacctatgtaacaaacctacacgttctgcacttgtatcccagaacttgaaataaattttttaaaaaaagaatattaaaaaaaaaaagtactcacttgggcaggtcacatactgaaattggagttagcacggcccctgtgcaaggatgccaagcaaatctgtgaagcgtttcgtatttttgctgcctgagtgatggtgaggatgtccctagccaccaagattgctgatacacaagtaaaaaaataaaaagtaaaaaccagcaaagacatttctctccatgtcacttgtttccatttaaagcaaaacttcttgaaataaatgcctatgcccggtgtcacctgctcctctcctcacacactctcttaaacctacttattcaggctttattcaccctctacttcactggaacagttctggtgaaaatagccaacttttggtgacatccatttgctaaatctgatgatcacctctcagttcttcactcatgtgacatgttagcagcttttgaaacaactgatcactcccttttccttgatatgctttttgtaactggcctccggggcccacactcctctggttgtcttcatccctaggactttttctcagcctcatttgctcggttttctttatctccctgacttctaagtgccccatggtgaatccctagatccattctcttctttatctataatcctcccctgtgtgattttattttgactcgtggctctacataccatcaacatgttcagtttagatttccattcggacctctccactgacatccatgattctatacccaaatggctaatttgacatgtcagcttggatatttaaaaggaacctcaattttaatatgtttaaaatggaactgtggatttccactcctaaatctgattctcctgaagtcttcctcacctgtatacctagcaatttcatctttccagttggtcaagacagcaaaacttggagtcatcctttattcttctgtttcttgcgcataccacacctggtccgtcagaaaactcaaatagctctacctttatattccggcatgcagccctgtcattccacctccactgccactgcctggtccaagcttctatgatcgcttgcctgcatggttgcaaaatctcctgatcaggctctttacttcaactcttagacctggtgtctctttatcttacagcagtcacaacttatgttcttaaagtatgtcagattatggaaaccttccccccatctccaaagccttctaatgatttcatattgagagattgaatgtaaaaagccagtagccagaccacacattaaaatacaactctgcagcacaacctacagcaaccggaaagccaaagacaacttttttggcaatcagcctccagtggtcaggatctgatgatggctttcctaatttttgtctccactttgaattttggaacaaccagacagaaccatatatgcacctctaaccataggataccccacttctagttaatccactagagcttccccatgccaacagcctccaatgaggtcacacctgaagccttcccttttttccactattaggcattcctgcttctctgcctgtctttgagtctttatcaaaacacaggtgatagtggctgattccattgctaaagcaagctctgaataaacagcacttgcttgttctcatcccatctggtctttgtttatttctatatcttactctgagtaaaaaccaaaggtcttccaatagtcctgaagggctcatgtgacctgcccaccacccaccccttcaccacctctctagccctcatatcttaggctctccttcttgtccaatttgcttcaagcacactggcctcctggctattccttgtacacacttggcacaacctgccccaaggcctttttcacttgtccatccatttacctggaattctcttaagttgttcatatgggacattttattactaccttccaatctcagctcaaatgagattctaattctaccagagactttttttttcgactttcctgtgtatcttaggcccctctactcacaccctgtccagccacagctttccctgtcaccctcagcatattttattttatccatatgtccctaatatactacttattttcttgtatacatattttcttcctcctccccacccctcaactataataaaaaccctatgaggccaaggattttgttacttctgtatcccctgcacagtatctggcaagtcgatgtcacccaatccatatttgataaataaataattagttacaaaatcttatattcacagatttcttaaaatgggggctttttaaaaattagtatgtcagtcataactccaggagaaaacaaatagcacactgaaaatgagtaatttaaaaagaattgaatcacgtgactattttagaaaggagggggcaaagatctgttaatacctaggcatggtaaaatgcttcgaggctaatgagagcagccccatcaccacctctaggcacaggacaggagaggctagctgagcccagagagtgagctaggccctaggccttccacaggcactctaaccttttgtggagggtgtgcagccagctctggaaaccctgagggaaaccaagggaataaacgcctggcccactctgcttttgccctccaagttccttcctgtattccccattggccgacccaaccaggagccagaatgtaagggaaacattaggcgtggttcccatttgtcagctcctggggcacagcgcagggtgaagcagggtggagcatggacctccaaggctgtatctgctgttccagcagtcttttataatttttaagtcataaggttaactgttttaaaaataatcatgaagtgttttctgtgtgggtgtgagactgtctgtgaaacaaactcccagtcaaatcccagagtatctgtttggggtttacaatgtcaaaccattgtactaaatggttgttattgttttacatgataactgcatttttttttaacaatttacttttgccatttttattatttaacatgccctttgactgtgttaaaaaagaatcattggtaatattgtatatgttattctgtcaggagtgaaagggagccacggaaatattccttatagctgataaatagatttatcaattctaagggaacagctattttttaaaatgttgaacaatgtattattgtaactttaatcatgaattgtccaaaaagaactcactttggatgaaaagaacagcagaacagacatttcaagatctgagttctaatcctgacttggccagccattgacaaataggttcaactatgcgagcctgagtttcctcatctgcaaagtgggagatgggacaagatgacttttgaggtcatttccacctctcaagtggtgctccattggaaggtgttaatgtgtgccaagagaacaaagttagatttataaaaactgtgtcagcatgacttatttatttagaagaaagcaattactagagatataagccatgttgggttttgtttttagatttcagaattcactggcccagagcctattccctttatacccacttcttttcccctctccttcctccttttcctcccactatgttattctaaagaatattcaagggggaaaaatcaatcattagagaaattttaattctgtatgattgtttcagaggtaagaagctcagacaaaaataatgcttgcaattgtgttttctctctagagccaactgtgtttattccccagtccaaatactccgttgaagaagatgttggtgagctgttcattcccatcaggaggagcggagatgtgagccaggagttgatggtggtctgttatacccaacaaggtagctcgatttgccgaaaaactaagataacccccaaaagatataaataagcctttttaacatattggagccataacattttaccatgaggggtatactttattaattttccatagatacagaaaaggatttatttagaagtctttcttcaggatttcacctttgacgagtcctctttctgatttcacttggtcacttactgcaatactcaaggctttttggattgtaaggaactaaagcccaacccagcctgctcaagtagaaatgggttactatataaaaaaaaaaaaaaaaaaaaagaggcaaagtgatgcgtgcccaaggaaaagaaactaatttaaaaccagtttgcaactcatttcaaagaaatatcaaaatgtttgttttgctcatgagcaaatatcctatggaaggtgattttatataataaaaaattaaaattaatacataatattcactaatatactaaacacctttctaggaaataagtagattttctaaaaatgcaaaatcaaaagttatatatgctgatatcagagtagacttttgttaaaattttcattcgtaggtatatgatttgaaaggcagtacagaagagtgattaaaagccgacttcagaggccgggctcagtggctcatgcctgtaatcccagcactttgggaggccgaggcgggtggatcacgagatcaggagttcacgaccagtctgatcaacatggtgaaaccctgcctctactaaaaatacaaaaattaactgggcatggtggcgcgcacgcgcctgtaatctcagctactcaggaggctgaggcagaagagttgcttgaacccaggaggcggaggttgcagcgagccaagatcacgccattgcattccggcctgggcaacagagcgaaactcagtctcaaaaaaaaagctgacttcaggaccagccttggactccggggtccagaccaagtggttcaacttctgaaaacctcagttaccaaatgtgtaaagccaggtggagtggttgagaggattaaggagacaagtatttgaagcacttggcactttgcctgtgcatagtaagctttagaatagtaggggctattaatttgtaacattgtgttgatctaaagtccattgacaggaaagtcaggagtgaacacttgaaatgtaatattccttataggtgtataggtttgaggtcactctcaagttgactcatgatactagaacagtacgtagttgctattgcagttctaggggtgttcatgtctactaactgaccattaaaatgctgtgtatgaaaataattgtgtctggaaatatctttgtcttatgttctacataaaaatcttttgaattctctctgcttccaggaacagcaactggaactgtgccgacttccgtgttgtcttactctgattacatatccaggcctgaggaccacaccagtgttgtccgctttgacaaagatgaacgggagaaactgtgtcggatagtcataattgatgactctttgtacgaggaggaggaaaccttccatgtccttctgagcatgcccatggggggaagaatcggatcagagttcccaggggctcaagttacaatcgttcctgacaaagatgatggtgagtactaatttacttgaaaattctttttcccgggaagatcaacatcaggaacaactttctagacagaaaaaatgggaatctaaaacaatgataatatacacatttattttatgtttggttttttcatatgattaggtttcaaagttggctgcatctgtcggtttgtcttccttgatttaatgtttttaaagggcaaaagtcacaattatgtgagttttttccgctgcgccgtttctttcaccaagccctgtaccatcaggtgattaaacttttgacatttcatggtgaagaattgaaatctaatttatttccttcttggttttttgttttgttttgcttttaaaagcttatattttgtaactttaatctcagtgtttgaaactgttttttcaaagaaacctgtcgggcaaggctgttaaatgaataactagtaaacatagggaaaattaagtccaacaagccactctgccccaaaacaggagggagagaatatcctagatcattcttccccagagaaactaaattgccatgaagtagaaatagagaagggagcaaaaggatcttaatctccccagttcaagaaacagtttgtatttttttgtgtggatacagagagcaaacggaaatattgtgaatactcttgtaagtaaagcagagagcagtaaactgagagatgggacaccctaaccctgggctggttttctttcccccttgaaattttcctcctggtagatgaaagaggaagaaactgggggataaatctttcggtttggaaagaagctggaagacagtcaaaagaccaaactgaggaagctgaaaataatctaccaggaaaggtctttgatagttaaatggcaaagcatgtgagaggtgaaggtgataatgtgtcttgtgaggttatactctgtgccaggcatggtactggctcctctgtacattcttttaaaaagacctttgcataggtttattggatctttgtatttctttgaattgtctatatacaaattgattttcttactgatttatagtagctgtgagaataataggtattttaccttttactgtatgttgttaaaatttcttctagtttctgccatttgtttttggtttattttgtttttcaaattgacaaataattatgcatattcatagggtacataatgatgtttagacacatataaaatatagtggtcagatcagcataattagcatgtccatcatgtcaaacatgtatcatttctttgtgttgggaattatcaacatccttgtagctagctgaagctatgtaatgtattattgttaactagagtcaccctacagtggtatagaaaaccagagcttgctcctcttatctagctgtaattttgtgtcctttaactaatcttcccccatatcccccatctttcctcccttcccagcttctgctacctttgtgtatcattgtgctttatcatcctaacaattctgtagaatccataacaacatctgtgtttttactgaaaatgtttgaaaacacgaaaaattagaaattattttatcaagaggtattgaaagtcttgattctaccttaaatttatataataccctataagtataagctgctctaatatttttaactgctgccttaattgatcagtgtaataagaagttctattctgatttaaataaagtacagaaattttattttaactttaatttatcttaaagaaagagcaatattttgaatatcatttcagaaaaatctaatagcccatgctaaatgcctatctgctctttagataatctatcaattgttacaggtagaaagaagtaggtttaatttaaaaaaagaaaatgtaattcatgtttactttagttcagtttgttttttttggcaaaaaaatctttcctgtatggattgctatgggatgcacatgcagaaaaaaacataaaagtacagaaaaaaacatttattaagtgccaggcattttcacaaatgtatctctaaatctgcaaaatgaaagatgatgccattatccctattttacagatgacaagactgagacttagagagactagttgattaacttgaacttacgaagctagtatacagcaaagtcagtatcatggcccccaaatcatgacctttccatgttattactccacctttaaaacgtgtctctagtggtaatgaggttgaggaaccattggtatggtcctatcatataatattcatagaacattttactattgtcagtgtcttatcagagcttcacaattcactgatgtagacagggcaagtggcattataagtggggtagcgaaagcccagaaaattatttaccccagaacacagggctggtaaatttgggtgccatggactttgattttgaggcaactgagtaccatgcagacattagaccagcagtttgtcaggaatgctcttggtgattattgccattgcttcttcattcactcaaccactattcaataaatcaaaagtcctatgcatactgctctgttttctcccatctgtcatttaccttccacttctaacatcactactatagtttagacagatccttttcatctcagatgcagattataataaacttctcacagttcccacagcctcatatctcttcctacccacaccttggtttccattgccaccaatttaacctttcctaacctcctcccacaccttttctcagcacaaaacccaaaaatgttgacagcaaactttgccatcgtcaggaagatagataggcaccttccactttccccaatcaaaagccagtaatgctctaaaaagaaaaaaataagtaagtgtggtttaatctcttctggtagtgtaatgattgagaaatctataaagattaaagttatttcctaattaacttatttattatttattaatgttatttattaagtttattattgttatttattaatgttattatttattatttattattatttattaatttagcaatatttattaatgttattcaacgaatattgcaattattttcttaaaaatgcaatggtcagtccagtcacagaataaggaaaagaagaaagaaaagaggaggaacaaaggaggtggcacagggaggatgggtctcatgagagcaaatcaaagacagattgatgagtaagaacaggacaaaccaagaaattaagagagaaaatgacagcacatcatatctaaagaagaaagaaaaggacagtactgaaaagaggagatgagataagcccattagggcctctactgtgggtaaaccacgtctttcatatcctggcactcatttagagggttattttctttctttacagttacttgaaatagcactagcaaaataaacccagtttacagctctttgagtgctatattttcaagtcttcagaagcttgcagtgagatcattatgacctaccagaaggaattattccttagactgcttaacatagcagatggcacaagctcaccttgaggcttaatcttcaccctgagagtaaagttgcagttatccagtttagtattccattgaataagaaatttaataagaaataagtttgggatggtttatctattaatactgtaccttatccactgctgcgtccccacagaatccttttggttgagtctttcagagaccaccttactgactaaatgatgatttatagcacttcagtgaaaaatactttcagaagatcttctgttacttaagaaatggctgcgatatcaaatgtcaacactttatagaattgacaatattgacttacggtccctaggacctgcacttagagctcaatcatttcttttcattcacttatcacagtttgtcttttctttgataattctcaacgtcattttacatatttattttgtcatattgtgccctttagtataatgttggatggaagcagtagagcaggcatttttgtctttttctcattgaaaaggaaaatattataatggtcccccatttagaataatgtatactataagattctagtaacattttatcaggttaagaaaacatttagtttgagaagagattttatcaggaataagtattaaacattttaaaaatttctgcatttattgaacgtattacataatcttttccttcaatctgttagtgtaatgaattgcatttttagatttactagtgttaagccacccatatatgcttgaagaaacttacttgttcatgatgtaattttataaattgctggattaaatttaagaatatttcattttagtatttttgcatgtatatggggctttaaatctgtttatttttagaatcaagtttataatggcctcattaattgagttgaggtactatcttccttctttaatctgtaaacttcaaataagattgacataatttaattttgtaggtttggtaaaattataaatctgcctgtatgtatgtagctagattttggcctattgtttggcttccttaaatggttatttcttcttaagttttattaatgtattttttcctaagaaagttgtgtatattatctacattttcaaaataatactgtaaattaattatattatcataaaattcttaaaagtctctattgcatgtctatttatgtatccattttattactaataatgttcttctatcctctctctctctgtctgtctcttttccttttctctttcaatttatctttccagaagtttgtatattttattcaagtttttttttaaaaaaagctatgtttggttctgacttttcaaaaaaaaagaatagaaatttttggaaatttctattctttttattttctatttcattaatttctgtttttgcctcagacttaccttccagttggctaattctctctatatctatttgctacttaactcatccactgagatttattttgataactatatttgcattttgagaagatctgtgtggagtttttttatatttatctttgactttctatcatgctttattttttcttcatatagtttcttttttatatatttaataatttagatatttattttataatctttgttgcagttttattattgaagatctaaggtccagatcttatgtttttcgcttcaactgcttcttgttcatggtatattacttccttgcatataataattttgtcttatgaattgactttcaatgagattttatatgtagaaagcctatacaatcctagttcagggattaaaccctgagagtagttttgcttttatatttgctagggtcgatttctatgttatgttttcttttttaatttgaggagttccagtgccaaataatgtgaattaggactccaaatctgtgtattagagaggcctattgagacattttttccccgtccagaatttaggcagaaacaacaagctccataagaggatgggtttttattctaactcacacatctcctctggtatccagactttattcgtggggtttcagtttcaaatttccactttacatcacctgttcctgtgtgggcagtcaaatgcaacccactcaggacagccacagtattagctcatttagctagtactctatttttttttcaattctgtcttgtgagagtatttcttactttattgtaaaacctccatttaaaagagtttctattatatttgcagagtttgtgagaggaaggttttcaagtatatccttcaaaatattgctgttataattcactagaaaagcttttattgagtgaaaataacatgtgtccagaagtgttttctgcattggtgcttatggactactcttctaatactaaattgccatttgtaccatcagttctcatgtcaggaataccatggctgagtcaaagatggggcaactaaactttttattaggttggtacaaaagtaattgcggttttggccattgaaggtaatggcaaaaatagcaattacttttgcatcaatctaatattttgtgagacaaatgctcttaaaagctttaatttctagacatgacctttttggcaaagtgatttaattattatgcaaatcccgtttttcttttattgtactgaaacttatccaagtcaagcccaaaatagattatttgaagtcttattttaattaatcccattgtattgtttcccacaatgcattattcacatagacaaaatctcaccattaaggtgtcagtgggcacagaaaattaccattataaaccaaattcccatgtgaaaaggacaagagcacttggcaaagcaggaaaaattgggcgatgactgaaacagcttacttctcatagatcatcaaggattgctagtgactgagattcaatgaagggggaaagtcaacaaatttaatttggaaccagtgaataaaatagatgcagtacttcttcaacagcacatttaaaaatatatgttttaatataaagcatctgaaaaactcttcgtcgatatgcttttttggtgtctcagttgaaaagagtctaggccaggatttgttcaagtgagagcatcaaggaactcagtttccacgtgtgaatttgctgcttaaaagtctctcatgtatcttgattattcacccctttcttaccttggccaccatccctaaaagtgcatgtatgaagaataaagcaaaagtacaaaaagcattgtattagtcagttctcacgctgctgtgaagaaatacctgaaaatggataatttataaagaagagaggtttaattgactcacagttccacatgcccgggaaggcctcaggaaacttacaatcatggcagaaggcagctcctcctggggcagcaggagagagtgagagccaagcaaaggggaaaccccttataaaaccatcagctctgagaactcactcactatcacaagaacagtataggggaactgcccccatgattcaatgatctccacctggtcctgcccttgtcacatggggattattacaattcaaggtgagatttgcatggggacacagagccaagccatatcaagcacagaagccaaaagcaacatatttatttcatttggcttctatcttaccacttccttgactttcaatgccagaaagtattttaaagtaaagagtgagtgcactttgccagtagtatatttcctccctcatgtcttcatctacttttatcatactgtagcaaaccctattttttgtcatttaatgggaagtccttattgtttgtcattggaaatcactacatctaccatatacttaacacaaataatacaaagataaccatgaaaacaaaaatgtccctttaggccagatgcagtggctcatgcctgtaaccccagcactttgggaggctgaggcaggcagatcacttgaggtcaggagtttgagaccagcctgaccaacatggtgaaactgcatctctactaaaaatacaaaaaacttagccgggtgtggtggcacgtgcctgtaatcccagctactcaggaggctgaggcaggagaattgcttgaacctgggaggcggaggttgcagtgagctgagatcacaccactgcactccagcctgggcaacaagcaagactcggtctcaaaaaatatattttaaaaaagtcccttcaatttttccatgaatcaaaatgtctctggagtgtatacaattgtcctctccttgtcagcagtttcccttttcatggtattagttacctgcagtacagaacaataagatattttgagagacagagaccacatttacataacttttattttaatatgttgttataattattctatgttatttattattgttgttaatctcttactatgccaaatttataaattaaaccttattatatgtatgtatttattagtatttacagggtttggtactatctgtgtcttcagtcatccacttgggcgtcttaaaatgtatcctccacagataaggggaaactactacatttgcaactataggcagctaatattcactcatttatgcaaagcactttgatttgggatttttttttaatcattcgattttcattgcagtactgtaatgtgggaggcactatagcaaggtttttaaggataagataaaacaaagtagacaataaatttacctgaaatcaaatgattaagtataagcaaatacagtggtgccctccatttgaaataaattcacactgtgaagtttttgacttaataatgtaccgcacaaattttttctttgaaagaagaaacctgccacttgaaagatttcctagttggagtaaatcatgagatggaatctagataatgttgaattgcagtttaataaatttttattttacaataaatattttttgagaattttatatcactcattcattcaaaaactgtgaattgagcacctgtgtgcctgcacatggctaggtgctggggacataacagcaaacaagagaaccatggcctcttaattcatggaccttccagactttgggggtacacagataagtgaacagacaagcataaaataaatgtggtaagttctctactaagacaagaacacctttcccaaaccaggttcaggaaaaacttctttaaaaatgttattttctagctgaactttgaggatgatatcaaggtatcccagtgaagagagaaggaaagtgtgtttctggagtgagaaattcacaagtgcactggctaagtggatgggatgcctccgtggaactgaaagcttggatacagcaaaaaactagagctcaaatgagtgaataacaagagtttggagaggtgggcgaggagtcaatcttatagggccctgtggccatataaaagagttgtgtttcattcttgcaatagaaataggtgacacctaaaaggttttaggtaaaatgacaaaattagatttatattttagaaatatcactctgctctggctgcaatgcaaagaaaagattgaagagctcaggtggctgttggagcaacacaggtgatcggtgacagtggcctgaacagggtggttgtatgaggatgcagagaccaggaggcatctgagagatagtgctgaggaagaatgggcatgtcatggtaattgattggacaggaaagtctgaaggatgatgctttggtttctagttagagctgttgggttaagagtggtacagttcactgagatggggagaataaaggtagaatgggcttaggaataaaaaacaatgaatttatttaaggcatgctagtacgaaagaaatgcctgcttgacttcaaatgcgggatatcaaataggcaactgaagatataggcctgattaggaattctgcactagaccattctgtgctagaggcattgtgacaagctctctctatggataatgataaaaatcttaggaaaagataaaattacttaagagacctgcaaaagtggacctagtatgatttataatatggatggatttacactaattctcatttaaaggaaaggaatagatttcatgaatgctaaacagaagatgacaaatgataaatagaatagtcagtattaagggtatgaccatcccagcaaagaaggtgctaaaaagaatctaagaaccaaacacatctcagtgtctgagtttaataaaacatgcctaactctgcactattcagcatgtgacaagctatgtcattgtttattcctgttgcttactaaaagattttaaccagcttattttgtgtatttttctttaccacgtgcaaatatttcaccaatttttgaaataataggaaagattaactttattttagaggaatttgctttttgaccatctttgttggtatacttcttatcttactagctttttggtcaaattttattaatgtctaagcttcagtttccatgggtttgaaatggggatactagttttacctgtgtattcttcgtttttttttaataaattgatatcttgatgttttatctgtcatgcatattgtttatacatgataaaaacattgctagctatacagtactgtgtgtgcagttttatcagttcagcatggagagaagaatgcccagttcaatggggagaaagtcaaatttcattcatatgcaatactacacatacaatactaacagctgccacttttgaccactttactatatactaaggactttacatgaataatccagttaaacctcaaagcaactttatgatataggtataagtatcttctccatttgatagatggaaaaattgagacctggagaaaattacttaagatcacacaaatgttaagtgttgaatatatgtcctaaatttaggtctgcttacctcagataacatgtgcattaccactaggctgtaatgaatcctgaatctcctcaaaaggattaaaatataagtattacctaatgatctcactgaagggaggaaattggcatggaatccggaaaaaaatggtccaaaaacatataggtcaacattggtcaagaaggagatgtttctgagggtagccaatattgcagtcactaaaaatttgcagttggagtagggaaaatgttcaagcctgttgtacaccctggatgaggtgtcctatatggctttccaacatatttttttttttctgattgctgtgttcttttctggtagtgggtatactagatgaggaatcaaccaaacaactattccctgactaaagataaatgaatcccttgtaactttaaaaaaattcttttgttttttactaatacaaaaatgtacatatttatgaggtacatgtgagtatttgttacatgcatagaatgtgcaatgatcagttcaggatatttggaggatattcatcaccttgaatatttatcatttctatgtgttggtaacatctctagtcctctctttcagctactttgaaatatacaatacatcattgctaactatagtcacccaaatctgcaatcaaatattggagctaatttgttctgtataattacatatttgtactcacaaacacacctctctttatccccactcccatccacatacccttcccaacctctggtatctatcattctattctctgtctcaatgggaatcaatttctttagctcccacttacgaggcagaatatgcagtatctgtctttccatgcctggcttatttcacttaacttaataacctccagttccatccatgatgttgaaaaatgacatgatttcattccttttggtggccagatagtattcccttgtgtgtatacacgatagttttctttctttctttctttcttttttctttctttctttctttttttgtcgaaatgagactttattgaaaagatgttgggaagctcatagaatcattaaggtggctggcaaatcaggtttagataatgggcagaatccaagggaaaacaggtacctggatctcatccataactgtgtacagcaactgttgtaccctggctaccagaacttgagccatcactgttggagctggatataggataccctatgagatcctctggaacggatgaccctagaaactggatgttgctgtggctacttccagagcaatttctctctgccattattactcatgtcacttgctttacagtcaatgttctggtaaagaactggggctgggtattgtgtcttcatcctaactcagatggtaggggaaagtaattatctgaactttttggttgttgtcatgagatattctttatattccaccatgactcagataatggggaagttccccaaaacagaggatggcaattctgatgctaggcattttaacaactgtaaaaagtacctccctaaccccccagccccattcccctacaaaatgactatggttattctctcatgccatgtccatatttcagttctgtgaatataatgcacttgattgcttgtgaattcataagtatacatgatagtttctttattcatctgtcaatggacacttaggatgattccatatatttgctattataaatagtgctgcaatgaacacacaagtgcaggtattcctttgatatataggtatctttttctttggataaatacctagtgctaggattgctggatagtatggtggttctatttttagttttttgaaaaatttttatactgttttttctgggttttttgtttgtttctgtttttgttttgttttgtttttttgaggcagagttttgctatgtttcacaagctggagtgcagtggtgcaatgatagctgcagccttgaactcttggattcaagcaatcttcctgcctcagcctccagagtagttaggactaaggtgcacaccaccacacctggctattttctttaaattttttgtagagatggggtctctctatgttgcccaggctggtctagaactcctgactcaagcaatcctcccaccttacctttgaaagcatggtattaaaggtgtaagtcacctcacccagcttactatactgtttttttatggtgattgtactaatttacatttccaccaagagggtgtgagttctcttttgtccgcatcctcacctgcttctgttattttttgtctttttaatattagccagtctaacgggtaagatgctgtctcattgtgattctgatttacatttccctgatgcttagtgatgttgcacattttttcatatatctgttggctatgtatatctttttttgagaaatgtctatcatctccttagcctagtttttaatgggattatttgtatttttttaaaaaattgctgagttgtttgaataccatgtatattttaaattttacttccttgtcagataaatagtttgcaactattttctcccattcaatagtttgtcccttcactctgttgatcatttcctttgatgtttagaggctttttaatttaatatagccccatttgtctattttcatttctctctctgtgcttttgaagttttagctgtaaaatctgcctagacaaatgttcccaagttttccccatttttttcctagtagttttatagtttcatagtagttcttagtttttatagttttatagtagtcttatatttaagtctttaatccatcttgacttgatttttgtatatggtgagagacaggggtccagtttcattcttctgcatatagatatccaatttagccagcaacattagtctttgggttttctagatataaaataatgtcatcagaatatagggacaatttgacttactttttttccagttttaattccttttctttctttctcttgcctgattgctgtggggaggactttcagtagtttgttgaataggagtggtgaaagcaggcatccttatcttgatctataccttagaggaaaggctttcagctttttcctgttgaacatgacgttagctgtgggtttgttatatatggcctttattattttgaagtaagtttcttctattcctagtcttgttgagcatttttattatgatggatgtttaattttctcaaatgccttttctgtgtctattgagatgattatatggtttatatctttcattctgttgatgtgatgtatcatgattattaatctgcatatgttgaaccatccttgcaaccctgttttaaattgcacttgatcacggtgtattatctttttgatgtgctgttggatgtgctagtatgagaatttttgcatctatgtttatcagggatattggcctatagttttgttgttattgttgttgtgtccttatttggttttgaaatcagggtaatactgtcctgataatgattttggaagtattccttctttatctattttttgtactagttttagaagaattgctgttaagttcttcttcatacatttggtagaattctgcagtgaatttattaagtcctgagcttttctttgttgggagacttttcattactgattcaatcttgccacacattattgaactgttcagattttctatttctttctgatttaatcctggtaggttgtatattttcaggaatttatccatttcctctaggttttccagtttgtttgttagtctgtagttgttcataatagtctctgatgatcatttgtatttctgtcatgtcagtggtaaagtttccttcttcctttctgattttgtttatttgggtcttctatcttttgttggttagtatatctagaggtttatcaatttcatttagcttttcagagaaccaactttttctttcacagattctttgtgtgggtttatttcttgtttagtctctgttttcttcagttctgttctgatctttattatttctttccttttgctaatttgaggtttggtttgttcttgctttttggttccctgaggcgcatcattatgttgtttatttgaagtatttctacattttcgatgtaggcatttattgttataaacttccctcttagagctacttttgctctatcacacaatttatgtattttcatttttatttgtttcaagaaattttttttctatctaaattttttccttgcaatagtcattcagaagcatgttgtttaattttcatgtatttgtataggttccaaagtcccttttttgttgatttctagttttattccattatggtctgagcagatgcttgataaaatttttcttttaaaaaatttgttgaggcttgttttgtggcctaacatatggtctatcctgaagaatgttccatgtaatgatgagaataatgtatattctgcagttgtgggataaaatgttatttaaatatctgttaggatcatttgttctgtagtctagtttaaaactaatatttctttgtttattttctgtctcaatgatctgtctagtgctgtgagtggggtgttgaagtcccttgctattattgtattgctgtctgtgtttttctttagacctagtaatatttattttatgaatcttggtgctctagttttgggtgcatatgtattttggattgttatattctcttgttgaattgatccctttatcaatatatagtgaccttctttctctttctttctttcttactgtttttgacttaaagtctgttttacctaatataagtatacctactcttattttattttggtttccatttgcttggaatatctttttcctcactttattttgaatctatatgtgtctttgaaggtaaagtgcatttcttataggcagcatatatttgaattgtttttctttatccattcagccagtctgtatctttcaagtggagaatttaatcaattttcttccaaaattatgattgatatatgcgactttgttactgtcatattgctaattgttttctggttattttatatattatctgttactttttttccctcttattgtttgtcgttgtggtttggtgttttactgtagtggtatcatttgagtcctttcttttcctcatttgtaagtttggattacaaatgagttttacagttttgtgtgttttcatgatggtgaaagtcgtcttttcacttacaagtttagggatcccttgaacatttcttgtagggccaatctagtggttatgaatttaatcagcattttcttatctaggaaatactttatttcttcttcatttatgaaggataatttagttagatatagtattcttgagtggcagacttttttttctttcagtactttgaatatgtcattatctccgggcacataaagtttctgctgagaaatccactgttggtctgatgggagttcctttataggtgactagaagcttttctctttctggttttaggatccttttttgctttgactttagacactttgactataatgtgctgtggagaagacctttctgagttacatctgtttggggatatatgggcctcctatatctgaatgtctaggtctcttgctagacttgggaaattttcgtctgttattctgttaagtagggtttttgagacagagtctcactttgtcacccaggctggaatgcaatggtgcaatctcagctcactgcaaactccacctcccgggttgaagcaattctcttgcctcagcctcccatgtagctgggattagaggtgcacaccaccatgcccagctaatttttatatttttagtagaaatggggtttcaccatgttggccagcctagtgtcgaactcctgacctcaggtgatctgcccatctcagcctcccaaagtgctggaattataggcatgagccaccacacccagcaattaagttggttttttaaccctttcattctctcttttcctgcagagacagcaataatttgaatatgtggttgctttatttggtactaaatgtcatgaagacattgatcattctttttctttttgtctgactggattattttaaaagacctgtcttcaagttctgagattctttcttccacttgatctactctattgttgaaacttgtgaatgtattttgtatttcattcagtgaattcctcagttccagaatttctgtttggttgtttaaaaaattatttctttggtaaaattatcatttatatcctgaattgttttgttgatttctctctattgtttttcagaattatcttgtatctcacggagcttcattaaaattagcatttttaattctttgggattttgtgaatttccttttgatagaggtctgttgttggagaattatcatgcttatttgaagatttctttccatgctttttcatgtttcctgtgtccttatgttgatatctgtgcatctggtgtaactattgcttctaattttttgaatttacttttttaggtgatgactttttattgacgatctatatatggttttggttggagagggtgcattacctttgatttaagtgcatgcagtagtgtaatattcatatgattttattgactgtaaataacatccatggtatctgtgattttctctgtggcctagggtatcattattagtagaagctgtgctgaagatgctctgggaactaggatgctaggtaggccagtctttgagccccagtggtggcagtggtaacctaagcatgcctgtctgtaggccccaaggtagtatatgctggtaccagtattagtgggtcatggtggcccagttcgttggctttcatgtggcttgctcagatgctatcagtggcagtggtaggccaggaatgtgggagggttcttggttttctggaccatggatataatgtgggaacccaagaggtctgttgtggtggctgcaatagattgggcacgcacatatgggtagatgtcatctgtggtgatatcggcaggttggtttgccccaacctcagatcccaacattattcagcttccaacagtggcaaactgagatggatgatttccagacccctggatggtgtattcaaacactgagaggacaggaccaggctggtagacttgtcttcaggacccccggtagtgtgttcaggtgctggttttgataagcgaggtggggttgttcccccgccaccagtggagtgctcaggtgtgggaaacagcagattatcgtgggcctgccaccagggcaagtggggccactctcaatgggaacagagtaaggaggtagctgtgggatgcatggtttcctttctcctcagtcccacagcagccggcaacagtgacaattacctgcttggcctcttctctccttttttggcccagcagcagcagtggcaacatcagccccagctccagggcataacgcaggcctttggaggctgggctttcaggatatccccacctgtgggcctgccaccaggaaggcagggctatctcagtgggaacagaatagataggtagctgtggggagtgcagtttgattgcaccccagtcccacaacagcccaccccaatggcagtaagatttttcctggaagtatgtgaagatgctcagcctgtctctgcccctccttggcatggtagcagcagtggcagcatcagctccaggataagacacagtcctttgggggtttgattctcagaatggcaccaagctgtagctgctgaaggctcagaagcctgtggtactcagcgtaagtttcctctctagagcaatgcctctgtgcaacctgtaggcatctccctatgacaatcacaagccccatataggtcgaggggtctcctgtagctgggattgtgaaagtttgtagagggaatatggagccctgggggtctgtcacttaccctttccgcacttgtgggaggttctcccagctcccagccaatcccagctgagcaggttgccttgcttccctctccttctttgcttttggtgcttcccattgcttctctgttgaatcccaatatggtcccttagattgtctattcaaagtttgaatatttgctatttcggtttctttccatggatgaggcatgtactagctgcatctagtcagccctcttgaactctggacctccttataactttgtaactcagggcaaatctgaaattttacatgtgaatttgttctctaaagctatattacctctcaataaaattatgaaattatgtttttgtgctcacagagtggaagatcaagccctgccttactagtgacttctcttagttgcaatgtctgagaagtccagctgaggccaaagcttttctctgtgctaactcttaactgtgtgcaagtaggtcaggggcgctagaagtacaggaacaggtcttgatgaaacctgtgtcgcgtctttaagacacggctaaaatttttgtactgcagcatgtttacacacaagcaacacaactgatgttaagaacaatgctctcattttgtgcagatatcaaacatctgacatcgatgtctttggtcctcagtacttcagtaattttacaatttaatacgcagtattgtttcactagggtcagtattaagtcagtgttaacaatatttcactaatctttactgtcagtcttaggaaggtaattaaggaacattcaaactgaatctattctctgcctttgtgtgacaacccgcaggggttttagctaaagtggcttgcttcctggaccaccctgcaaaaattaccatactagatataagccaggcacatgtaaaaggcaacatggtgagctctgtggtaaatgtaactcagttcagtgctgttcaaaagcttactgacatcagaaaagctttctcaacagcaggagtaccttggagaagaaaacatttctagtgctagaaaaatacatcatggtatggtgggtgtgtgaatgaaatttttttattcatttgtgcctagctgaaagacctaatcaccatctgtttttgtttgaatacaattatttgcattacgcttgcaagctcccaaaaactaacggcagaacagtcattataagaaatggccagattcctttaaagtaacaacttgagaaagtcacattctgtatttggtatacttgagttagaacaaaatgaaaaatcaaaaagtagaaaaatgagtttctaatttctccgaatattaatgcaatgtagccattggtagcctatttaatatagttgatgattctaacaattcgctgaaagtcagttgatgattagcaagtgccaacaaagtgaaagcattccagggattcactgaatagtaaaaattataccaatttttccacatgagaaggatactagatagaaaaatgtagatattatagtctgaaaacaaaaatcaaaataaatcaaacagtatgtataaaatatcttgccatttaaaaaatatccaatgtcaaaaactacatgcatgtagcaaatctttgctctgcacatactaaatacggtatgtggggggatacaaagacatttaaaatataggccaagaactcacaatacttaaaatctgtttgaaaggaaaagctaagtatgtaaaaagctaaacaagaataatttattttagtaagaatttgaaacagtaaaaagactaagagagcagagtgtgattaaaagcaattgtatgaatcattctgagtcagaggaagaacagatgaagcatttaaaagatgaaaaggatgtagatgaatgaagaataaggctacgtattgtcagattgcatgagagaaagcttgagggagggaaaggcttttgggcacagtgagcattccagtttggccaggctccctttttatgtggaaggtttaatgcccagctccttggattgggagttaggagtcctgggctgtagacaaatttttgcaattttccagccaataattcctgatcaaacaacctttcttcttaaccaatccagctttcttctctagccaattttcctcatttgaagcatgagcatatttttacctgaatttcttaccttatggcatgttttttgagtaacaaataatatgatctatataaaagcactttaaaaaccaagcaaaagaaaaataagagtcattggcagtagagcctggataaacgagcttgaagcacatttatttgataggaagcacctggatgtttttgaataagagaattaaataatcagagcagtgtttcaaggttattaatgatatagcagtgtacgtgaaaagaaatgtagggtaaggaggtgaggctagaaaggaaaggactcactgctaagaaaaacctgacataactaggacatcacagagggaggaaggaggagagggattgaaaaaaaatctacgttcaaaaaagattgtgcgtggaagctccaaaaaactgaggtaccattataggaggttaggagaaggaattagtctagggaaagaaagatggaagaagatgagactctatttaaacatactaagatagagctacctgcagggcatgcaggtgaaaccaggcaataggccggtaaaatacagaactaactaagctgaagtttgagatttataagtcacatgtctgatggtggcagttgaaataaggagggtagatgacatctacaagaaagagaagagagggtgaagaaagtcaattacttgcagtagaattttatctatagttataataaattgagtatgtgaagtggaataatgaaaggttaccagactatatttctactaaatattaatgtatagattttttggctgttagctacaaatagtaattatcacttgttatatattaagaaaattgtgaaaatgtgcggtattaagtacattaatggaattgtcaaataataaatatacctttaggcccttttaaataagctgttattaaatcttgactattaaaaatagaaattaaaatactgttgtgtggtttcattccatcattttgtaactcatttcaggtaaatttaaaccacttttttgatagtcatttaacatctttttttttttttgtaatagtttccggagaaaggttgcaaaattacaggattcattcacttttaacaaacacatgagtgggagagggtaggaaaaaaatgaacattgtgagggtgagtgagtcattcactaaatacaagtaggagggtccagagaagagagacttctccatgtttcacttgtgggaggacttgtggccccatgaatcccaatttctagccctttctacttaattctaaactttgattcagaacccaccaggccagctgtttatggagaatagttttataagggaggaagtgcgcagtgcacagattaaaagaaaagcaaatttgagcttcctgaagctggatgcccatatctctcctagaacttgggaagttttctgatatgtctgtaatacctcagagatgttgagagtttggttccagaccgctacaataaagcaactattgcaataaagcaagtcacacaaacttttcattttccccggcatgtaaaacttatgcttacagtatgcaatagtctattaagtatgcaatagtattgtgtctaaaaatgtacataccttaaataaaaaatacttaaaatactttattgccaaaaaatgctaatgattgtcagagccttcagtaatttgtaatctttttgctggtgtaggttcttgtctcaatgttgatggctgcttatggatcagggttgcggaaggttgggatggttgtggtaattacttaaaataagacaacaatgaagtatctgcaccttgtgatactatttgatagcattttactcacagtagaacttcattcaaaattggagtaaattctttcaaactctgtcactgctttatcagctaagtatatataataaactaaatcctttgttgtcatttgaacaatgtttacaccatcttcaccaaaagtagattccatctcaagaaaccactttctttccttattcattagaagcaacttctcatccactcaggttttatgataagattgcagtgattgagtcatattgtcaggctccaattctagctctcttgctttttttgccacatctgtagttacttcctccactgaagtcttgaacccctcaatgtcatccatgagggtttgaataaatttttttcaaccccctgctcatgttgatattttgacctttttgcagagatcttgtctctgttatatatatatatatatatatatatatatatatatatatgtatggttttgttttgttttgttttttgcagagacaagatctcactatgttgcccaggctggtctcaaactcctgggctcaagcaatcctctgacctcagcctcccaaattactgggatgatagctgggattataggcatgagccaccacacccagcaaattacatatattcttaacgacatctagaatggtgaatttttccagagagttttctacttactttgaccagatctatcagataaatcactgtctatggcagctatagccttacaaaatgtattttttaaatgataagacttcaaagttgaaatgactccttaatccatgggctgcagaatggatgttatattagcatatttaaaaacaacattaatattcttatatatctctatcagagctattgggtaactaagtgcattgtaaatgggaagtaatatttttaaagcagtccttttttctgggcagtaagtctcaatggtcagcttaaaatattcattaaactatgttgtaaacggatgtactgtcatctaggctttgttgctccatttacagagcacagagtaaatttagaataattcttaaattacctaaggttttctgattggtaaatgaccgttggcttcaacctaaagttaccagctgcattagcccctaataagagagtcaggctttccgttgaagctttgaagccaggcattgaattctcttatttggctacgaaagtcctagatggcttcttcttcaaatataaggctgttttttctccaatgaaaatgttatttagtgtagccctcttcatccttcattttagtgagatcttctggataacttgctacagcttctacgtcagcacttgctgctttaccttgcactttaatgatttagagacggcttctttccctaaacctcatgaaggaacctctgttagctcccaacttttcttctgaagcttcctcgcccctctcagaattgaagagagttaaggccttgctctgaattaggctttgacttaaggggatgttttggctggtttgatattctatcccaaccactcaaactttctccgtatcatcaaaatggctatttcgctttcttatcatttgtgtgttcactggaatagcattttaaatgtccttcaagagctattcctttccattcacaacttggataactgttgggcacaagaggctggtttcagtttttgacataccttcctcactaagcttaatcatttttagcttttgatttaaagtgagagacatgaaactcttcttttcacttgaaaacttagaagctattgtaagcttattaattggcctgatttcagtattcttgtgtctcagggaatacagaggcccaaggaaagggagactaatgggagaacagctgattggtggaacactcaggacaaatgcatcatttatcaattaagtttgacctcttctatgggcgctgtttgtggcaccccaaaataattacaatagtaacatcaaagatcactgatcataggacactataacaactgtaataataataagtttgaaatattctgaaaattttcaaaacgtgctgcagagaaacaaagtgagagcacatgctgttggaaaaatgatgcagatagacttgcttgccacaggtcttcaatatgttaaaaataaaaacccaaaaaacaaaatctgtgaagaacaataaagcaaaacacaatataaggaggtatgtctgtgtttcattaaacaggtttttgggtttttggtgcttttctccatctcttctccatctgacattcttctgacggaaatacctgttcacttatttatgtcctgttaagttccataggctttattttttcattttttaaaattgttattttttttctttgacggattatcttaaaagccttgtcttcaagttcagaaattcttctgcttgatctagtttattttttatactctcagtagtattttttatatcattcattgaatttttcagctccaagatttctgtttggttcattttaatgatatatatctacttggggagtttatcatccagatcctgaattgttttttaaattttcttttttttttaaatttttgcaggtacgtagtaggtgtatatatttttgttttggctgcctgtgcttatggggtattgtgcaagagattttttgccctgaccaatgtcctggagagtttccacaaaatattcttgtagtagttttatagtttgaggtcttaaatttaagtctttaatccatttttatttgatgtttgtataaggcgagagatagggattaagtttcattattctgcatatgaatattcagttttcccagaacaatttattgaagagactttttcccaaagtatgttctcagcacctttgtcagaaaatgagtttactgtaggtgtacggattggttttttgggttatcttttttgtttcattggtctaagtgtctgtagatagtaccaagttagtaccatgctgttttgattacagtcgttctgtagtataatttgaagtgagttaatgtgattccttcagttttgttcttttgctcaggaaagatttagctattctgggtcttttgtgattccatataaattttaggattgttttttctacttctgtgaagaatgttattggtatttttatagggattgcattaaatctatggattgctttgagtagtatgaacatttaaaaatattgattcttctaatctatgcacatgaaatatctttccatttttgtgtcctcaatttctttcatcagtgttttatggttttgttgtagagctctttcatttctttgtttaagttgattcctaagtatttaattttatttgtggctattgtaaatgaaattaatttttaaatttctttttcagattgttcaacttgacatataggaatgctattgatttttatgttgattttgtatcctgcaactctaatgaatttatcagttataatatttttggtcgaatttttaggttttttttctgaatataagattatatcatctgcaaaaaaaggaaaatttgatttctttcttttcaatttagatgacctttatttctttcccttgcctgattgttctagctgagacatccagttatatgttggttaacagtggtgaaagtggacatccttttcatgtgccagatctcagagaaagggctttcaggttttccccattcagtatgatgctagctgtgggtctgttttatatggttttcattatgttgatatatgttccgtctatacccagttttttgagggttttatcatgaaggatgttgaacttcatcaaatgctttttcagcatcaattgaaaaaaacatatggtttttatcctttattctgtttatatgatgtaacacatttattgatttgcatatgttaaaccatccttgcattcctggaataaatcctatttggtcatgatgaataatatttcaaatatattattaaatttggttttctagtatttcattgaggatttttacatcaatattcatcagagatattagcccatagttttctttttttatatgtctttatctgactttggtatcaggataatgatagaatgagtttgaaagtattccctcttcccctatttttcagaacagttttaataggattagtattagttcttctgtaaatgttttggtagaattcagcagtgaagctgtcagctcccaagcttttctttactggaaaactttttattatggctttaatcttgttattaatctcttcaggtttgagatttctacacagttcaatcttggtaaattaattttttatattacattaattttgaataatttatccatttcttctctgttttccaatttattggcatatggttactcatagtcactaatgatcctttgaatttctgtgatattagttgtaatgcctcctttttcatcactgattttatttatttggatcttctctctttttttcttagtctggctaacagttttgtcaatgttgtttatcaataacaactttttgttttattgatcttgtgtattatattcttcatttcaaattcatttatttctgctctgatttttattaattcttctactaattttggtttagtttactcttgcttttctagttattgaacatgaattattaggttatttatttgaagttttttctgttttttgatgtaagcatttatagctataagtttcccttttagtactgctttgctgtatcccataggttttggtatgttgtgtttccattatcatttgtttcaaaaaatttttcagtttccttcttaatttctgcattggcccactggtcattccggagcatattgtttatttccatgtgtttgtatggtttccaaagtttatcttgtttttgatttgtagttttattctatagtggtcagagaatatcctttatattatttcaatttttttgactgttttaagacttgttttgtgacctaacgtatggtctgttcttgagaatgattcctgttctgaggagaaaaatatgtattctgcagttgttggataaatgtaaatatctattaggtccatttgttctgtagtgcagattaagtcagatgtttctccattgattttctgtctagaagatctgtccaatgctgaatgtgaagacttgaagtctctagctgttattgcattgggctccatctctctctttagctctaacaatgcttactttatatatctgtgtgctccagtgttgggtgcatatatatttacaattattgtatcttcttactgaattaacccctttatcagtatacaatgaccttctttgtcttttcttgcagtttttgtcttgaaatctatagtgtcttatataagtatagctactcctgctcttttttggtttccattcgtgtgggatatctttttccattcatttattttcagtctatgtgtatctttataagtgaagtatgtttcttatagtcaagagatcatcgagtcttgttttttcgtccattcagccagtctatgtctttttattggagggtttggtccatttacatttaaggttattattgataagtagggacttactcctgccattttgttatttgttttctggatgtctggttgtcgggtcttttcttcttttctgtcttccttttagtgaaagtgattttctctgttggtacgctttaatgtcttgctttttattttttgtgtatccattgtatgctttttgatttgagattaccacaaggcttgcaaatactatcttataacctattattttaaactaatgacaacaacactgattgtataacaaccaaacaaacatgcacaagaaaactaagaaaaactacacttttggctgggcatggaggctcatacctgtaatcccaacatgttgggaggctaaggcaggcagttcacttgagaacaggagtttgagaccagcctgggcaacatggtgaaaccctgtctctacaataaaactacaaagattagccaggtgtggtggtgtgtacctgtagtcctagctacttgagaggctgagatgggaggatcgcttgagcccgggagattgaggctgcagtgagccttgattgcaccactgcactccagtctgggtgacagagcaagaccctatgtcaaaaaaacaaaatgaaacaaaaagaaaaacaagcaaaaaaaaaaaaccccacaaaaacctctaccgtttaacttcacccctgcccctgccaccttttagctttttgctgtttctttttatttcttactgtagtgtctatgtttttaaaagttacagttattatttttgatggattcatcctgtagtctttctacttgagagaagtttataacaccacaattacagtgttatactattctgtgtttttctgtctgcttcctattaccagtgagttttgttccttcagatgatttcttcttgctcattaacatccttttctttcagattgaagaacctcctttagcatttctcataggacaggtctggcattgatgaaagccctcagctcttgtttgcctgggaaggtctttatttctccttcagttttgaaggataattgcgcaagatatactattctagggtaaaaggttttttttccttcagcactttaaatatgtcatacccctctctcctgtcctgtaaggtttccactgtaaagtctgctgccaggcatattgcagctttattatatgttatttgttttctctctctctctctctctctctctctctctctctctctctctctctctctctcctctctctctctctctctctctctctctctctctctctctctctctatatatatatatatatatatatatatatccctctctctctcttgctgcttttaggatcttttctttatccttgacctttgagagtttgattattaaatgccttgaggtagtctcctttgggttaaattggtttggtgttctataaccttctcgtacttgaatgtttatctttttctctaggtttgggaagttctctgatattatccctttggataaactttctacccctatctctttctctaccttctctttaaggccaataactcttaggtttgcccttttgagggtcttttctagatcttgtaggtatgcttcactgctttttattctcttttgtctcttctgtgtattttcaagttgcctatctttaagctcactaattctttatcctgcttgatcgattccaatattaatagactcagatgcattcttcatgatgtcgcctacatttttcaagtctataatttctgtttgattcttttttaattattttagtctatttgttaaatttatctgatattctgaattccttctctgtgttgtcttaaatttcttcaagtctcttcaaaatagctcttttgaattctctgagaagacatacatctctgtttctccaggattggtccctggtgctttatatagttcatttggtgaggtcttgttttcctggatggtattgatgcttgtagatacttgtcagtgtctgggcattgaagagttaggtatttattgtggttttcacagtctgggcttatttgtgcctgtccttctttggaagactttccaagtattcaaaggcacttgggcctcaagcccaagacactgtgatttttgcagactcatagaggtagcaccttggtggtcttggctgagatccagagcagttctctggattacaaggcagaggctcttgttcttctccctttctttctgccaaacatatagcgtctctgtctctgtgctgagccacctggaacctggggtgtggtgaggaagcacacctgtggccaccactgttggaactatgctgagtcacacctgaagcctgtaaagtactgagccttgcccaaggcccttcacttcagaatggcaagtttccccaggccccaaatgtgtccagggatgctgtctgggagccagggattagaatcaaaaactttagcaacttacctgatgttctattctactgcagttaagctgatattcaaaccacaatgcaaagtgcttgctgctcttctctccccttttcgcagtcagaggagcctctccctgggaccaccaccaccactgatccatggggggctctactaggccaccaccaatgttggcataaagcccaagggcttttctcttagcttgtggtgaatgctggcaggcacaggactcagccttcaggacagtgggctcccctctggcccagggaaggttttgaagtgctgtgcaagaatctagaccttgactcagggaccctaagggcctgcttgttgttctaccccattgtggcagagctggtgctgatttttggctcttgtggtggtgcttttctgtgtacacatggttgctaaaatttggtgttcctaggtggagggaacaaatggtatagccttctattccacaatcttgctctacttcccatgaattgtttttatttcattgcgttgttttactgggttccttgtatctggctgtttccttaagatcattgttttgaaattttcaggcattttgtacatgcctttttctttggtttctcttactagagaaatgttttgttcccttgtagaaggcaagaaacaaatctcagaatagaaaagaaatggaagctaaaaaaattcagaagatcaacaaaatgaagagttaatttcttgaaacaataacaaacttgaaaaacctttagctagactaagaaataaaagaagacaaaattagatattaaacaagagacattacaactgataccacagaaatacaaaggatgatgagaggctgctttaaacaactatatgccaacaaatttgataacatagtccatttgagattacccgaggctgggtaatttataaggatacgaggactatttggcacacagttctgcaggtacaaaaaagcatggtgctagcacctgttcagtttttgatgagggactcaggctgctttcactcatggcagaaggtaaagaggagccagaaggtgcaagatcccatagtgagagatcccaagctttttaacaaccagctttggggagaactaataaaatgagaactcacttacatccaccaagggaggacattaatctatttatgagggatctgtacccataacccaaacacttcccatagaccccacctctgatattgaaaccaaatttcaacatgagatttggtggggacaaacaaaccatatccaaactacagtagaagaaatggataaattcctggacacatacaacctgtcaagattgaaccatgaagaaatagaaaatctgagcaggtcagtaatgactgaggacattgaatcagtaataaaaagtcctccatcaaagaagagctcaggactggacagattcccagctgaattctaccaaacatttaataaagaactaataccaattcttctcaaactattccaaaaaattgaagaggaaggaatacttccaaagttatcttacgaggctggaattaccctgatttcaaaatcaaacaatcacataacaacaaagaaaaactacaggttaggatctccagtgaacatagatgtgaaaattcttaacgagatgctagcaaactgaatccaacagcatattaaacaaatcattcactgtggtcaagtggagtttattccagagatgcatggatggtttaacatttgcaaaccaataaatgtgatatgcacattaacggaaagaattattttttaaaatatcatttcaatagaggcagaaaaagcatttgataaaaatttactatcatgattaaaacgctcaagaaattagattcacatggtacttacctcaatgcagtaacagccatatatgacaaacacacagctaacatcatacagagtgaggaaaaattgtaagcttttcctgtaaggtcaggaactagacaaagatgcccgcttttaccatttctatttaatgtagtaaatgaagacctagccggagcaattaggcaagagaaagaaataaaaggcattcaaatttgaaaggaggaagctaagtgccctgtttgcagatgacatgatcttatatatagaaaaccttaaagactccattgaaaaacagaactaataaacaaactcagtaaagtcgcagtatacaaagtaaacatacaaaaatcagtagcatttctatatgctcttagtgaactatctgaaaaagaaatcaagaaaacagtttcatttacaatagctacaaaaaagatacctagtaataaatttagtcaaggaggtgaaaaatctttatactgaggctataaaactttgatgaaagaaatgtaaaataatacaaatacatggaaagatatcctatatttgtggattgtaagaattaatgtcataaaatggccaaactactcaaagcgatgtacagattaatgcaattcctatcaaaatgccaatggcattcttcacaaaaatagaaataaacaattctaaaatttatctagaacaaaagacccaaaacaaccaaagcaatcctgtgcaaaaagaacaaagctggaagcttcatactacctcacttcaaaatatactacaaagctatagtaagtacagaacaacatggtgctggcatgaaaaacagacacatagaccaatggaatagaatatagaacccagaagtaaatttacacacctacaaccaactgattttcaacaaatgtaccaaaaatacatgttggggaaaagacaatcttttcaataaatggtattgggaaaattagtttatctacgtgcagaagaatgaaactagatccctacctctcactatatataaaaatcaactcaaaatggattaaggatcttagtgtaaaatctgaagctaacagaagaaaacataggagaaacacatcagagcattgggctgggcaaggactttttagataagacttcaaaaggatagtcaacaaaaggaaaaataggcatataggattatatcaaactaaaaagcttttccatagcaacagaaactgttaagagagtgaagagacaacctacagaatgggagaaaatatttgcaaactatagatgcgaaaacgggttaatatctagaatatataagggacataatagcaaaacaacaataacaatattaatcaaaaatgggcaaaaggccatttttcaaaataagacatacaaatgacaaacaggtatataaaaaatgttcaacattgctaaccatcagagaaacacaaaccaaaaccaaaataagataccatctcacttcagttagaatggctattataaaaaaagacaagtgttggtgagaatgtggagaaaagggaacactgacgtactgttggtgaggttgtaagctagtacagccattatggaatacagtatggcggttcctcaattaactagaaataggattcccatattattcagcaatcccacagttgagtatttactgaaaatatttgaaatccatatgttgaagaggtatctgcatgcccatgtttattgcagcactatttacaatagctaagatatggactcaacctaagtattcaacaatggatgaatagatgaaaaaatgtggtataaaaacccaacagaatactatacagtcataaaacataatgaaatcctatcatttgagacaacatgggtgaacctggaggacaccatgttaagtgaaataagccagacacagaaagacaaataccacatgatgtcactcatatgtggaatctacaaaggaaaaaaagttgatatcattgaagcagagaatagaactgtggttatcagagattgggaaaaggagaaaggagaggtagatggagaaaggttgattaataggtacatgttacaattacatagaaggaataaattccagtgttctattgcacagtagtgtgactatggttaacaataaaatattatatattataaaaaagctgactggacatgatggctcatgcctgtaatcccagcactttgggaggttgaggcaggtggatcacctgagatcaggagtttgagaccagcctggccaacatagtgaaaccccgtctttactaaaaatacaaaaattagtggggcagaggttgcagtgagccaagatcgcaccactacactctagtctgggcaacagagcaagcctccgtctcaaaaaaaaaatgctagaagaaaggcttttgagtgttctcatcacaaagagataatgcatgatgtgctggatatactaactacccttattgtgtcattatacaatacagaaatatatcaaaacatcaagttgcacctcataaatatgggaaattacagagtgtcaattaaaaaacaaatttaaaaacaaagaagaaggcaaatgagcaaagatcagagactgctgtagtgggtttgttagcaataggagtccatttgactcaacctgttatggccagaacctccaaaggccctggctgctatgctgctgtgcgcttgcctggtctttttgaaactgttgatacaatgcactgctcaccacaggaaaagcattaaagagctttgttccactgcacacacacaagcttggcaagcagccacttgaatttctcctgctagtcacataaaaacatttcaccaccattaccagaaaaggcaaaggctccaaacttctttatgagaaaaactaaccattttgtataatttacactgaagaatgacctttctccccacaagaaagtgagcacagggagctgtggcaggacatagggctggttcacccagaaatgagccctcaaattcatggagtgtaaatttacagatatgtagtctgctagagtggttttaggatatcaaggttgtggtaccgattaggatcatgctgttcacaatattaaattaacttatgtctttattttttagggctttgtagatatcatatatttttatataatcatagctatcatgaacaccttccaagatgtgctaaatcttttacctgaattatttaatacacatatgcacatacacaaattatgagccaagttttattatgcctgggttttatcatctgtgagtggttggataacttgcccaaggtcaaacagccggtaagcatttagccagcctgactaaagagactatggcattaacaactacgcagcacacttcatattatactagcagtaagtatatttaatatacacaatgaccttctgattctacaatgtaatactcaaagttattattagttatcctaatagggaagtttacaagatgaaacaagctatatatacttttatagacatatagcacctgaatattgataattgaaatgtcatagataatagaataacttgtaaatgaactattcttgttgatcttttatcaattataactccccttggatctttagcaaagcttattagtgcagtctcaatctggtacttcaattggacaaggaatagcactgctttttccacatcatctagcaaatgacccggtgaaaatggttgcctttctgaaagattgcattttggctctcttgtcaagtcctcgtggataaatattgtcttgagtttgttttgtctttttcccagtaacactatctgcctgattcccatctcttccaaacagaaaagtgaatgctggccatgcaatactatcttacagacatcaaagaatacatatttctgatttattaccactaaaaccctggaagcagtttactaaacatttataggaacctcaagatctcagtcacagaaaattccattttagtgttaaaaatcacataaatctgagaagcagcttctcagatactagacttcagaatttgtaaatttaaaactattaaaatgaattttataataaaaaccaataaaatacacaaaaagttgattaaatggaaaagatctcttactagatactattgttgtgatcaaaaagtcctaattatttgctggccagagaggtctggcatatctttttattgaaatcataaaacatacagaaaatgctgaaaagccaaacatggcaacttggctgaaaacagagcacttcaaagtcttggcctgcatgcctcagtgatgtaaagagaggccagcatctgtgaaatgctgccatggacttgcagggctatgattattttaagtctagaaaatgcactatgcacctatggtctactgttgaaaacatgtacctccattactaaacagacagcagcatctccacgtatggtattagaatgaaatattaagaaaacattttgtaatagatgtactattttctgacattggtggatataccagtggtcactgtagagatgtgaaacttgctagtttgcttctttataaaaccagaagtagttgtctcattaggagtccttatggtgtccctatgttctctgtgaaccttccttctctttgtagataaatgttacctttcagagggaacagataggtgttatgttttccttgagaaataggccttcatcctgtctgactggacatcagatcttcttttccctgatttattcctgtgttgtaaatcttatacattttttttttgtaattggcctaaaatcttccttaaattatgtagagaaccttacactgacctagaaagatacaagattgcccagtcaaatatagtgctattgttatttgacaaacagtaaagtatgtgacaaataatcacaataataatttatattgaaattttaaacatatagctaaaactaaaaatgccttctttctctaggccatttgtaaccatttgaagcacttaaaatgatggatgaagcttttccttcatactactggagaaataaatcatctttttttctcttttttctaagaaacaggtcttttttctgtctctctgaaacaggcgtttgaaataatttgaattcacacatttattcatttaaaacacacacctaacatctctcatgtttccagatgctgtgcgagggtagagggcataaggatttgtcctggcctcacttcacgtgcttataggcccctgctaagtggcgggcagtctccaggacattaaggacacagtggtgaaagacactagcccaatctatagagaacttcgagacggaaatagacaaacagctccaacaaggcaaagggtaagtccaggctccccatgcagtgacggctttcagaaggttctctcacttggcctcaggctcccggaaggccagttctcttccacacaaagaatggaggagtctgaatcattgagtgggcagccagtaaactgatgctcagagtcacgtgtctttttaggctgtgacagtctctccattgtgaagacaactgcactatttgggatgagccaagttacagtacaattcagcagttcctgagtttaaacacattcctgtgaaaagaaataaaacagctgatagatctttactcgtgtgtacctttttaaaaagcaagaatataggtattgtgagaggaaaaaaatagctttctttttacaccttatagagctgaaatatatctcagcttcaatttccctgagggtgtttcacaaacaatgggtttcacaggcccaggaagtatactacagagctgaagctctgtggtcaaaatgccaacaaggagcccattctttctttcttttttttttttttttttttttttaagaatcacacttattcagaagggtaatttttgagagcacactccctgccagagaaggctttaaaaagccaaagccacagtctttcacagtctcagtgctgcaagatgatcctataaatacaagataaaattagaagtggtctaggtgttgctttatgcctgtgggtctagcgtgcacggtctgcatctcataaactggtggaatgctgtctgcgctaaatagggggttgaaaacagtacagttttataagtctttccaggggatcgctatcctcccaacaaacctagcatgcatgttttctgtgatgttggtcctcaacatatattttgaagtttttaaaatgacagtatatctaaatagtaatatgtattcgatctagttcagtatactgagaggacaaatcaacgctttgcagtagaagatgttaggttagctccctgaggaaaattttatgactctgttcaacacatcccttgacatctctgtgaagaaggaaacttcatcaaaccctgtgatgtaattatggaagacacaatgattttgtcatgtgtgaaaactctttttttcttcttctttttaaacagtgcaagaaaagtgatgtaggcacacatcttaccagacttaatgtcttagattctgaaaagcatcaaaacaaatcaggagaaaaactcaatagattagaacacttagtccttgccctaccctgttttattcccgcttatccctaatcttggtgaatggttctatgagtactggattccttcctctcagtcctcaccccaactccttgattctacctccttcatatctctaaatattatatccttattatttttcctcgtctgaactgccatcacctgatccaaacgaacttcctatcttgcctggattcttgcacttgccaactagctaggccgcctgcttccagtttgctcatatcccacccctttccaccagaccattcatcctccagaaccctaaatgcacatttcatcatcatgttccccccttttttaacactgagcacacctctcacctgctaatttctaggacaaggctcccaccacaaggtcctgcatggcctggccatggctccctgctttccttgttcaccccatctcctcattccaagcagcatacaataccacagcaaactctgcagcccccaaacatatgaggctgtctacttatctttagtttctatttctgcttctacttgaagaaaaattctccctctctacctcctcattcatcagctggctaactcatattaatgcctcaaaattcagctgccaataattaaaataataataataataacttatggtgactgagcactttccatgtgcaggtaaagtagtaactttatggtcatcttattcttcctttaagagaaaacattcacaattaagcaacagataagagatgagagaagtaccaggggacagcagtaatatggaaagaaaaggatgaagatgcaagaaaaaaggttgtggcccatagtattaaattcttcaacgataaagacaaagatttgcaatatgcaattgggttttgcaaaaagaagggcattggccaacttggagagagtatttcttgagtgttttggagaatgaggccgtgtttcaatgagcttaaaattaatgagagctgagaatatgaaaataatggatagagcatttcaagtgattattcaagtgaaaggaagaaagaaactttaagatcaaataccggtgcttgtgataggggacagagtggtagtattgtgggaaagatatgttatgatgattttatgtagagaagaaagagtgaggagaaagagacagttttgtcacataaagtagtaaaattgggtagcacaatctaagcaattagaattacatcatacaaggagaggcatgatatgcttatgaagccatattgctcggtgtctaattctggctctgtcttataaggtatatgttcttgggataattatctaacccttctctgccccaatttcctcataacgtaacagcctgatgagttattctggctcggtacacaaataaagaccgtggcattttaggaaagaaagagtttaattgacacgaggtcagccacaccatgtaggagatagagttattactcaaatcagtctcaccaaaggctcataggttaggggttttccaaaggtattttgagggaaacagtgggagtggctatgcaatgggtgcttgctgctgattggttgggtcagagatgaaatcatagggaattgaagctgtcctcttgagctgagttggttctgggtggggccacaggagccaccagttagcagctctaggtggagccatgctgttagatacacacaaaacctgaaaggatatcacaaaatgcctatctacaatagaaaagtgatgttatttgcaggagtaactggggaagttacaccttatcagaattcagactcctctcctcctgtaggctggtggtctctcattagcttcataaaggcaattgagttttggggaaggacggttttcatttaaactataaactaaatctcttccaaagttaaccagcctaaacccaggcagcttgaaagctaaagaaaaggttgggggtggaggggggcggcgggctagatcagatctccctcactgccataattttctcactgatataattttttcgaagatggtttcaataatactgtctacctcatagggttgttatacagaataaataagttaatatatgtaaagcacttagaataccaatatgtttagctgtcattattattactgccaagacaactgtgcaatgctgtgtttgttttcggttttaacttctagactaagaactcttcgaaaacaagggctgtgtctttatcatatccccagtatggagcacagtgcctgatccataataggtgttcaaaaaacagataataaattggtggttaaatgtatgcaggcaggagggttggccaggactacctttcttgatattcttcctattacttactgtttttataatatacaaaaaaattaaccacaaagaataaagccttatttattaaaaaaaaacccacatgtagtatattcacagaatatcaaacatctaagaacaaaacatgtgctttgtagcttacttgagttttcctaggtacgtctctgaaaagcagtggttagccttccacctaaagcctgcagtgaggcattgtcattgccctagaaagctctggctgctgcagtttatattcagctattagaatgaaaatgctgaacagctccttagtgacattacatgtatctgaacaccagtagccttaaattggcatttccttgtgtcagccatttattaagctgtccagttctattacccaggctcctctctgagctaccttttacccccatcactcacaggctctgccatgagcatcactcatatcaccctgactcagggctgtgctcctttcactctagaaagtggccttgctttatttttaaattgtattttaaaaatatattagacaggtttttattctctataaatgaaaatacacgttcaaatgattaaacaagttgttctctttaaagccaaaatgttatctgatataagaagtcatataaaaatcataatgcgtatgtttacagcttcttggttactctttaaacacaaaccatcttaaagacaagaatggttttctaactcctatttttccttgagaggaagcacctactatccttccaataaagactgcaggaaataagcatgaatcaattggataaatgttgaatgagagaaatagctgccaactagtatcatatcaacaggaaaaacacaaacgtcccagaagggcaagaagaatagcttggacctgaaagcttagagatctgacttcacgtagatcaaattggatattgcagaccagaaatacaagaaccaaagaagttgatttccccagtgtcgggcatttcgtaagtgactgagagggggagtggcacccctggcttgcagaacaatgatttttttttccacgtacaacaacgcaaggaagcaatgcaatagcgttgactgctaatatagagtaacacaaggataaccgaggaagaaggatctcacaataaaggagcacattccttccaacttgaaatggagtcgcttttgctgtttactctggagtcccttcctgtgctgcctgcaggcgtgttcaggtgtcagttgtcaagcagcctgtggtcaagattacttattgtttgagtgtcaatcacatgcttttattcctgagacctcacacagattgtgtttgacaccatattaatcgtcatctttcttcattcagctgttggaattcccaaataaatcaccctcatgtcacagtctctgttgatttcaaaatcttacttataaaatttactttagttagcaggaataaaatgtacatatgtgacttctgattggtgatttttgaagcagtgacaattttaaaggtatggagagtttaagcataaagtgacatctcattttatttccctcttcctagaatcttttaattaagaaatttatcctcacaacttaggaatactgatctgtataacatattctaattttctcttacgtagaatatcatgttcctccctttttctttaatcagattctcattacacatcttttaaagaaaatattctaaaaatctaaacatctaaaatgtttacatgtccagactcttaaccattttcagaaaaagtactatttaatttttttacagtacagattttgtatgtgagtaccttatgtttgaatcctccttataccacattctagttgtgtggcgttgagcaagttatttaacctctctgagtcttgacttaattttatttgtaaacagcagataaaaataatcacctctacagctgttgtgagcattaagacaatataacaaggtttctagagatcctggtgtcactggggcaggggcagtcagtaaatgtagcgattataatattaatattacattaactatgatgttaagtggtgtgttctcacatacctgatgagatttacatccaaaatgattacttttgaatagaaacttgggaggcagttgtcagtcttagcttatacctccacacttgttttgatgacctcccatacaccagactgtatgtttctcattggagtttacagacgaacaataggtgattcctgcctttgggaagcttgaagatggatgtgtggatagatcactgaaatagggcataaaaataatggaagaagtgtgagaaggcaagactttcttgatagcagtaactgttaagtaagttatatgtaagaatggaaagacacaaactttgcaggacctcaggactgtgagatgatgtttttgaaagtgcagtaactactcagttccctagacagcataatcatccacaacactgtgaaatgctatagacagttggtagagttgaacctgttaaagagtaaaaatgttttagagaacttaacgaagaggagagactttctactctctaatatttttgcctaatattctgagattatgtttaaaggagacaagttatacatgttaatctttgtttagtaataatatcttttatcacaaacttattacatgagtaccaagaaggagtcttgtcatcttcctcacggaagccacacctctcccttgaggtcatttagtttgatgcatctttccatacatccaataacatgcacacatttttgtttcattttaattagagtaaattattggtaaagtggcacaatattccaaaggcaggctgtcttacttccttttcaattattggttattgatcttgaatttctggatctcagttttctcatctgtaaaatgaggatgataatagtttgtacctcaaaggttgttaggaagattgagttagtagatagataaagacagaaatatatataaagtgcttagaacagttcaggtacactgaaagtactcaataaatattggttattattattacatgatgatatatgtattatcttacgaagtacttatttcacataagaatacataatggccaggcacagggtctcaccctataatcccatttctttatgaagccgaggtaggaggatcacttgaggccaggagtttgagaccagcctgggcaatatagagagaccccagctatacaaaaataaaaagtaaaattagcctggtatggtgttgtgtacctgtaatcctaccttcttaggaggctgaggcaggaggatcacttgagcccaaagattccagtttatagtgagctatgatcttgccactacactgcagactgggcaacagagagagagagaccatgtctcttaataataataaattaatttaaaaaaaattttaagagactatattatgaaaaacttttcatgtcaatgcatataaacccagctcatttttaatggttatatagtattccacagtctggctataacatatttaacaatcccctatggatgggcatttagactggtttcagattttttttctaatcacataagtgctgtagtacatatcctttttcacatatgcagggtgtcatttatttgcctagtctctatcattacattcagttttagatgtaacaaaatatataatatgacaagaaattatctgagccaagcactgctataagcatgttatatatattctctcattcagtccttataacaaatccatgacacatatgctgtcataatccctaattttacaggtgaagaactgagacacacacatattaggtaccatgcccaaagccatactgctagaaagtgattcagtaaggggtagaacataagcagtcttaacaaagcaaagttatttaattgagaaaaggcatccatattggcattcactgtgctatagcctatgatagctggctgttgatagtaagagtttctaacaggtctgtatcatatcccgtagtatgatgatatgggccttctccagaaatgaggccctttcagcctgtcatggcagaataaccctttccaagattccttttaacatgattttgaaaggaaatatatcaaactttttcattaactatggataactcaactatttatcattatttctcattttttgtcttatacaaaaagacaaacattaataggaaaaaatacaaacactatgatacataaaatagcatttgggggcctactatgctatttgtagtatagtacaccatgtagtgtagtatggaaatggagacctcagtaaaatgtatttattatatcctttttttttttttagatttcacagtgtcttgattttacctattaagtgagtatagagcccattcctctatgaataatttttttatttgaataaacaaattaatttgtttattcaaataaacaatagatagtgtctggaaactgaaagacacaaacggaatacacaggtttggagtgaaatttattttacccacatcacacaatttggctactttccatcagtgatttgctctcaaaagttgtttctctgcaacttttgtctttaaaaatagacataatgttgactaaatacattacttttaccagtcttctcaaacaattgtacttataaccttatgtttaattacatatattatctctgcacaaatctaggggatgccctcatctatagtcttagccacaaaatatggttgggaattttaatcttctctaaaagaagacacatagatgtgaataaagcgtgttgatatatagattttcttagccagataattttaaagaaatatatcatacaagagtactgggaaagataacaaacgaaagtgaggaaaatgactgtgtaccagaaatcagttggcaatggcacaatgaatgacaacacaaatatccttcaaaattaaaaagctggccagttgatcaagcaggatatcacccagtcatccactttgatactgtccttcacatgtgattgatcacaaagcattgtcactgtatttctgaagctcttctagaatctgacttctcaatcttcccacctccactgccctagctcaagacctcactgtttctctgaattgcactttcccctcaagggtcccacggcttatggtctaactctgcttcagtccatccaccatgcttggtttgctttttttgcaaaccaagttctgatgatttcaattccagcttaaaaatcagcgttgactcccttttttctgtagttcttagcatgtattgcaagaacttgcaaaacctggctctcaccttaacttcctccctgggctttcgccctttcctatactacagccacacaacttcccaacctactgcacactcacgtctttcttttcctttatctgagatgcttttcctcttcaatgctgccaagcattgaaggtccagctcacattttttcttctctgggttgctgtcctgtgtcagctctccatctcgggaacctctgcactacagcagctgtcacctgttacaatcactctgccctcccagactagcagctgaagggtgacgactgattctcagactctaatatgtgtacattcacctgaaacagtttaaaatccttgactcggagaaatgttggttttgttgatttaagatgaggccccaggaatgtgtgttttaaaacccctcgggtacttgcagtatagatctgtgaccacctttgggaaacagttttatatacaatagtttaggaaactgtaaattgcacctcactgagtcgagaaatcaattagtaggtcatgaccagtttttccttcttcttcctcatatatggggtatgctgtcatatggaatagaaaaaatattttaagttttgaaacaatcttctagaaggcagggaactcaatagcatttgtggaataaagaatactcatgaagcctcttcacatgctactggatgttggaaaattttgatgactgtgatgcttacattttattttacacttgtgatgactctcaaaaaggcaagagaagattccagaatgaaactacattgatgatagaatctctgatatcattatctttttgaagaaagactcactatgtattttcaactgagattttgggcaggttcagtatttaaattgtcatcattctagacatgtattgacttttctttactctccctgagaaaattatagttgacaagaaaaagaaatgttaaaacatgtctttaaaatgatatatatttttaaactttccctttttatatacattttaacttcaattttttttttttttgagatggagtcttgctctgtcgcccaagctggagttcagtggtgtgattttggctcactgcaacctccacctcccagtttcaagcaatcctcctgcctcagcctcctgagtagctgggactacaggtgtgcacctcatgccagactgaattttttttttttttggtatttttagtagaaatgggcttttgccatgttggccaggctgatctcgaactcctgacctcagataatctgcctgccttggcctaccggagtgctgggattatagccgtgagctactgcatctggtcctgaactttaatttttcaacaataattttgaaaatgctttttaaagactagatatgagctcatttttcagaatgtatgtttatgtaaagtatttattgaaagaaaagtgagtaggccagggacagtggctcacgcctgtaatcctacctgtcttggaggccaaggcaggtggatcacttgaggtcaggagttcaagaccagcctggccaacatggtgaaaccccgtctctactaaaaatacaaaaattagctggaaattgcttgaacccgggaggcagaggttgctgtgagccaagatctcaccacggcactccatcctgagcgacagagcaagactctgtctcaaaaaatgaaaaataaaaagaaaagtggggaaaggccatgcctaaattatttaaaactaattttttaatgatattattacagggagaagttcatcaacatttttttcttcttcgtttttcttagttgcaaaaggaatcaatgctacttgaaaaagttaaatgggtagcaaatgaatgtatgcaagaaatgtatagcaaaggaagtgaaatttcctcacaatctcagctctaggaaataaccagttagtggtttaacatacattctttcttattttctatgcatcaaaaaataaactatgtagtttatttttaataagatataataattttatacataccattctctatctaccatgttaaaaaatttcattgcagaaaaacccacaaacaatataacataaaatgtgctctatgtaaaattaaacaatattactatttttcatagttgctttaggtgttttaaagatatgaagcagtacatattaaaatgttaagtctcagcagggttcagtggctcatgcttgtcatctaagcactttgggaagctgaggcggacagatcgcttgagtccaggagttcaagaccagcctgagaaacatggcaaaaccccatctctacattagaaattagctgggtgtggtcatgcacgcttgtagtcccagctactcaggaggctgagacagaagatttgcttaagcccaggaggtggaggttgcagtgaactgagattgagccactacactccaccctgggtgacagaatgagactgtgtctcgaaaaaaaagcaaaaaaaagttaagtctctattagtgtcttttaactgccattgtccccaagagcagcatgtcataaattaagtatgtatatatactttttatagtcttatctttttcccatttttctgcagttttgtttgataactgtcttttataactggcatatggttttgttttttaacccaacctaaaaaacttttttaactatattttttaataataaagctaacaacttttaaataataaacaatttatttacatttgttcttagtattgatacatttgggctttttatttcattttctgcatatgaactttgtttctcctccttcccagcttcttgtaatattgggaaacttctccctattcttagttattttttattctctgctagtttctgcccttttggtggcaacccttatcattttaagagttatttaaccatctgagcaaccaagtttgttctcttgactaagacaaggacattaaaatatttcatctactcactgaaccccatttataacctccttactgttatctcaatttttaggttcaacattgaatggaaaaaaataattcaatgagtttactagcatattttattgatttctttgctcaacagaatttcttacattttgagtcctttggatttatttatttatttcagtgtccatctataggtagatgaaacttcttcatcttcaaagcctgaaaaacccatatttctctctcactcttgaattttgttttagtttggtttcctgtgatccccctcaagagttgattcattgcctgtctccagaactagagaccagtaggaccacactcctttggcttcacctaccactatgatgttctgcttcatttttagtccatagagatgtttattttgttttgagcacagtcctctttttgcttatcgagtatattaacaggagaggaaaaaatttcaaagctaccaaaaagaaatggcaaattacccctttttttaaattatactttaagttctgggatacatgtgcagaacgtgctagtttgttacataggtatacatgtgctgtggtggtttgctgcacccatcaacccatcatctacattaggtatttctcctaatgctatccctccccttgatccccaccccccaataggccccagtgtgtgatgttcccctccctgtgcccatgtgttctcattgttcaactcctacttatgagtgagaacatgcagtgtttagttttctgttcctgtgttagtttgctgagaatgatgatttccagcttcatccatgtccctgcaaaggacatgaactcatcctttttatggctgcatagtattccatggtatatatgtgccacattttctttatccagtctaacgttgatggacatttatagtagaatgatttataatctttggctatatacccagtaatgggattgctgggtcaaatggtatttctggttctagatccctgaggaatcaccacactggcttccacaatggttgaactaatttacacttccaccaacagtgtaaaagcattcctatttctccacatcctctccaacatctgtggtttcctgactttttaatgatcgccattctaactggcatgaaatggtgttcattgtggttctgatttgcttttctctaatgaccagtgataatgagcttttttcatatgtttgttggctgcataaatgtcttcttttgaaaagcatctgttcatatcctttgcccactttttcatgaggttgtttgttttttcttgtaaatttgtttaagttcattgtagattctggacactagccctttatcagatgaatagattgcaaagattttctcccattctgtaggttgcctgttcactctgataatagtttcttttgctgtgcagaagctctttagtttaattagatctcatttgtcaactttggcttttgttgctattgcttttggtgttttagtcatgaagtctttgcccatgcctatgtcctgagtggtactgactaggttttcccctagggtttttatgtcattaggtcttacatttaaatctttaatacatttcagttaatttttgtataagctgtaaggaaggagtccggtttcagtttactgtgtatggctagccagttttcccaacaccatttattaaacagggaatcatttccctatttcttatttttgtcaggtttgtcaaagatcagatagttgtagatgtatggcgttacttctgaggcctctgttctgttccactggtctatatatctgttttggtaccagcatcatgctgtttttgttgccataggcttgtagtataatttgaagtcagatagtgtgatgcctccagctttgttctttttgcttaggattgtcttggctatacgggcttttttggttccatattaaatttaaagtagttttttctaattctgtgaagaaagtcaatggtagcttgatggaatagcattgaatctataaattactttgggcagtatgcccattttcatgatattgattcttcctatccatgagcatggaatatttttccatttgtttgtgtcctctcttaggtccttgagcagtggtttgtagttctccttgaagaggtccttcacatcccttgtaagttgtattcctgggtattttattctctttgtagcagttgcgaatgggagtttgctcatgatttggctctctgtttatctattattggtgtataggaatgcttgtgatttttgcacattctcagtatcctgagactttgctgaagttgcttatcagcataaggagattttgggctgagacgatggagttttctaaatatacaatcatgtcatctgcaaaaagagataatttgacttcctctcttcctatatgaatacctttatttctttcccttgcctgattgtcctggccagaaattccaatactatgttgtataggagtggtgagaaagggcatccttgtcttgtgctggttttcaaagggaatgcttccagcttttgcccatttgtgtgatattggctgtgggtttgtcataaatagctcttattattttgagatatgttccatcaatacctagtttattgagcgtttttagcatgaaggagtgttgaattttatcgaaggtcttttctgcatctattgagataattatgtggtttttgtcattggttctgtttatgtgatggattacatttattgatttgcatatgttgaaccagccttgcatcccagggaagaggccgacttgatcgtagtagataagctttttaatgtgctgctggattcggtttgccagtattttttattgaggattttcacatggatgttcatcagggatagtggcctgaaattttctttttttgttgtgtctctggcaggttttggtatcaggatgatgctggcctcatgaaatgagttaaggaggagtccctccttttctattgtttggaatagtttcagaaggaatggtaccagctcctctttgtacctctggtagaattcggctgtgaatccatctggccctgggcttcttttggtttgtaggctattaattactgtgccaatttcagaacttgttattggtctgttcagggatttgaattcttcctggtttagtcttggaagggtgtatgtgtccaggaatttatcaatttctcctagattttctagtttatttatgtagaggtgtttatagtattttctgatggtagtttgtatttctgtgggatcagtggtgatctcccctttatcattctttattgtgtctatttgattcttctctcttttcttctttattagtgtggctagtggtgtatctattttgttaatattttccaaaagaccagctcctggatacattgattttttaaagggttttttgcgtctctacttcagttctgctctgatcttagttattttttgtcttctgctagtttttgaatttgttttctcttgcttctttagttcttttaattgtgatgttagggtgttgattttagacctttcccgctttcttctgtgagcattattgctataaatttccctctaaacactgctttatctgtgtcccatagattctggtacattgtgtctttgttctcactggtttcaaataacttacttcttcctgccttaatttcgttatttactcagtagtcatacaagagcaggttgttcagtttccacgtagtggtgtagttttgagtgggtttcttaatcctgagttctaatttgattgcactgtggtctgagagagtgtttgtatgatttccattcttttgcatttgctgaggagtattttacttccaattatgtggttgattttggaatacatgctatgtggtgctgagaagaatgtatattcttttgatttgggatggagagttctgtagatgtttattaggcctgcttggtccatagctgagttcaagtcctgaatatccttgttaattttctgtcttgttgatctgtctaatattgacaatgggtgttaaagtctcccactattattgtgtgggagtctaagtctctttgtaggtctctgagaacttgctttatgaatctgagtgctcctgtattgagtgcatatatatttaggatagttagctctttttattgcattgatccctttaccattatgtaatgcccttctttgtctttttttatctttgttggtttaaaatctgttttaagagactaggattgcaacccctggtttttttttgttttgttttgttttgtttttgctttccatttgcttggtaaatattcctctctccctttattttgagcctacgtgtgtctctgcacgtgagatgggtcttctgaatacagcacaccgatgggtcttgactctttatccaatttgccagtctgtgcattttaactggggaatttagcccatttacatttaagattaatattgttatgtgtgaattttatcctgtcattatgatgctagctggttattttgcctattagttgatgcagtttcttcatagtgtcaatagtctttacattttggtttgtttttgcagtggctggtactggtttttcctttccatattgagtgcttccttcaggagctccggtaaggcaggcctggtcatgacaaaatgcttcagcatttgtttgtctgtaaaagattttatttctccttcacttatgaagcttagtttggctggatatgaaattctgggttgaaaattcttttctttaagaatgttgaatattggcccccactctcttctggcttgtagcatttctgccgagagatccactgttagtctgatgggcttccctttgtgggtaacccaacttttctctctggctgcccgcaacattttttccttcatttcaaccttggtgaatctgaagattatatgtcttggggttgctcttttcaaggagtatctttgtggtgttctctgtatttcctgaatttgaatgttggcctgtcttgctaggttgaggaagttctcctggataatatcctaaagtgtgttttcaaacttggttctattctccccatcactttcaggtacaccaatcaaacgtaggtttggtcttttcacatagacccatatttcttggaggctttgttcgttccttttcattatgttttctctaatcttgtcttcacgctttatttcattaagttgatcttcaatctctgatatccttttttccacttgatcgattcagctattgatacttgtgtatgcttcacgaagttctcgtgctgtgtttttcagctccatcagttcatttatgttctctaaactggttattctagttagcaattcctcaaaccttctttcaaggttctcagcttccttgcattgggttagagcatgctcctttatctcggaggagtttgttattacccaccttctgaggcctacttcttcaattcgtcaaactcattctacacccagttttgttcccttgctggcgaggagttgtgatcctttggaggagaagaggcattctggtttttggaattttcagcctctttgtgctgatttttcctcatcttcgtggatttatctacctttggtctttgctgttggtaatcttaggatggagtttttgtgtggtcgtcctttgtgttgatgttgatgctattcctttctgtttgttagttttccttctaacagtcaggtccctcttctgcagttctgctgcagtttgctgtggttcccctccagaccccgtttgcctgggtatcaccagcagaggctgcagaacagcgaagattgctgcctgctccttcctctggaagcttcatcccagaggggcacccgccacatgccagccagagctctccagtatgaggtgtctgtcaacccctgctaggaggtatctccccatcaggaggcatgggggtcaaggacccacttgaggaggcagtctgtcccttagcagagctcgtgcactgtgctgggagatcttctgctctcttcagaactggcaggcaggaacatttaagtctgctgaagctgtgcccacagtcgccccttccccaaggtgctctgtcccagggagatgggagttttagcccctgactggggctgcagcctttctttcagagatgtcttgcccagagaggaggaatctagagaggcagtctggctaccgtggctttgcggtgctgtgatgggctccacccagtttgagcttcctggaggctttttttactctgtgaggggaaaaccgcctactcaagcctcaataatggtggacaccccttcccacaccaagctcaagtgtcccaggttgacttcagtctgctgtgctggcagcaagaatttcaagccagtggatgttagcctgctgggctccatgggggtgggatccactgagctaaaccacttggctccctggcttcagccccctttccaggggagtgaatggttctgtcttgctggtattctgggcaccactgaggtatgaaaaaaactcctgcagctagctgagtgtctgtccaaatggccacccaactttgtgcttgaaactcagggccctggtggtataggcacccgaaggaatctcctggtctgtgggttgtgaagaccatgggaaaagtgtagtatttgggccagagtacacagttcctcacggcacagtccctcatggcttcccttggccaggggagggagttccccgaccccttgcacttaccaggtgaggcaacgccccaccctgcttctgcttgctctccatgggctgcatccactgtctgaccagtcctaataagatgaactgggtatctcagttggaaatgcagaaatcgcctgccttctgcgttggccttgctgggtgctgcagaccagagctgttcctattcagccaccttgccgggatttctcctttttttttttttttttaatgcggagtctggctctgtcacccaggctggagtgcaatggtgcaatattggcccactgcaacccaaatgacctttaatttttaatctatcactgctgctgatgaagccaagtagagagtgtaaggtatagaatcacagagcatcaatatctcaaatattttttaacctgggggataaaactaaaatatatatatatatatatatgtgtatgtatatatatacacacacatatgtatacatgtgtgtatatatgtgcatatatacacacacacacacagatatatatatatacacacacacacacatacatatatgctttatagtctggtagtccattttgtgaaagaactgaatttaatccctttctgatggattttgggcttgtttccaattgcaccctaatacaaatgaatgaaatacaatgaacaatcctttgtatgcatctttgaacacttaggttagcatttctatatgacaggtcctcatatattgaattgctaggtaaaaactttgtccataaaaatcttgtgaaaaacttttatgactcttttcctgccttaatagtagtcaagggcacaggctttatctagatatgcatcctagttctgctatttccctgatgtacagcacaactttggggaaatctcttaatctccctaatccttaatttccttatctgtgaaaacgggattaatatagtacacacctcagtgggtggttgtgaggatgaaataaggtactgaatttaaaacaactactatggtatctagcaattaagttaccagtgttaaagacgctgaaatgagctaaaataatacgcggattgctgactccaaggtagttgcctgtcaagatttttaaaaacagtgctgggcctgtgtggaggcaaggggcatgtgcaggtctctgtatcttctgctcggttttgccatgaacctaaaactgctctaaaaactgaaacctcttaacaaacaaacacaggtgcctggaagcggctgttggagattctgagttggaaagttggagatgaggccctagcgtctgtatttttaaattgtctaggataattctagtatacttcctatttgggaaccagtgaaggcaaagtatttcaaaacaaaagaaaaaaaaaagcctcttctctttgagttcattttgattcacttttccttcctcgtgaatttcttgccgattcgaagggcagccttgcaaagtccttttactgcaaagaaaatcactggctcttccttctgaggcttcttaactgccactgcctgatgctaagagtgtcctcttctgactcacccaccacagagacagaaatatttattcatttgctgcagcaaataaataattctactttgatgttaattcattctacaaatattgattgcacacctattgcattgattaaactaagtgttagggaagttaccagtgaatagaggaagcttgattcctccacttagagaactcagagacaatgggggacatacgcacagtgatggtagaagttgagcaagggctttgtttggtaggggaaagcagggtgctccccacagaagtgacttctcaacagaggcctggaagatgtgcagagcagaaggtatccggacgaggaaggaggagcattcaaagcagcagagccatagagcaaaggctgggaggggcacatttaagacattcaagatactggattgtttagtagaaaaggggctaataggatgttgaaaaggcaaaccaagaccaaatgtttcagtgtcttgtaaaccatgttaagtagcttgtgaataatcccaagaacagtaagcaaagttgagaggctttcagcaaagggagtactatgatgagatttgctttgagggatgaccactttccttaagagcctggttaagtggttgctgggaaaactcaaatggaaggtgttattgcctacagctggattagtggaaatgagacagagagaaacctggggaaggggagtggaggtgaccctgtggattccgttatggagaagttcaccttgaggtgcccatgggacgtggattgattaggcaatacagctcagaagaaagatctcatttggaaacaattcctttgtattattttcagcaccggacaaaaaaggcagcattaaagcttttacttcattcagttctaagcaaacacattggttagatctacaaagcttacttgaatgatggtctatgcgcacttgagtaaataagatttggctccagatagcaattactactggcacctcttcctttcatctcaggagacacaatgtaattgtaaacatccatctagacactgggaaaattttccctctgggaaagaacttaaattgtttctctttgtctttgttgcaggtatctgtgctgtattgctcacctgtccacctcttctacgtttgtaggaaataaatgtgatcctatctgtgctgtaggtagtgaaagtatccccaaccttgagaagcgcatttatgtttaatgagctaaaatagacttttctgtagtcaatgccttgatctatgtcctttatttaaaagtataaagacctcaagggatagagtgtagagtttggcttcccttatgaatttcaccctcactaggccaattcaaaacctcccttgcactgctcacagacaatttggataaacttatctttcctctgcattctggagtgtcatctgagggtggtggagtgatgagcaaggactgttttatggtcttagttgggtgtaggctatgagatgtgtggctttatttgatcatcctcttattctaagtaataatatcctccactgattgttttatccattaagtctgtgaacttaaacatggtacaaggcacagtatgtatttaggagctgaattaaagaattgaataggcttctagtttacttcaaattgtactggggtaggggtatttccataactgatctacaaagatcttcagtttacttattttcttaaaagaaaccaagtttctaggccaaaaaaaaaaaagtttaccaaagaaagaggtgagttaaaagtcttactcatgaataataatttttgagggacaagcaattattctggattttgcatagatacctttcaaaggcatgacagtcacatctatttattattttattccttcctcttgctttagtactcattaaaatgttccaggaacatcttgctattttccttaagtgacatctataactcaacttactgcttgatgtgtctttaactcattcatattacataaggttttctcccagtggtaatgattataaacaatattcaaattgtagatattttgaaaagatgctgagaaattgaaataaacataatcattacttctttttagttctcactcatctaacactgaaaaaatatgctgatgcttaaccatttttttaattcatggcacaagaaactaggtagttagcagagtttttttttttcttatggaaactactgaatgtgttttaatctcataataatcacatcaaactttaacttcagtaattgtaattgattatttgaccagtttttcaatcattatgagtggagcacaaagagggagaaaaatcatatacataaatctactcataatcaaaagctttaaggaagtagttaattaacttttctaactcctcttattagcactgcattaaagttgaaggatttagggttaaaatcccatttccagtctccctccttctttctacaggagataacaatatattatgcaataggcaacgtaataatgttgtttgcatctttcatatcccttttatttttataacattgtcacatgtgccatgccacccccgcctctttctttctctctctctgtcttgcttacgtacacacttgcacagatacacacacacatgcatataaaacacatgtgtctgtacatatatggtaactcattcgtcttcatttcgaatgacaacttagaagttttcagagtactacacccataagacttccatattttttcttataaaaactacacattaagctataaagtaaaactacgtgttttggagttgacagaatgagtctgaaacatgcaacacaccatttggtccccgatgtgtagcttatttggtgtttagcagttgtatattcactcatttgattttattatgttccttttttgttatgtgtctgtgaggagttgggagataggaagatggggaggtatcattgttaaataaaaggtcctcccttaactgcatttcacagctctctcccataactcagaaacctaatttgggtgctgatgtggtttgccaggaatgtgaagagacttacagagatcacttgttggatgcaggtgatcaagcctctgtgatagttacggaagccttttaaaagacttacagatgtgcctggtttggccatctggtcagaagatacattttcagagctctctgtcttcacctttgtgccctacctcagtgtgggaaatgtcaggaatgtattggcttgtaattgaggttggctttgactgaggttaacagataacaccttcatctatacacattacactcatgtgccctagcactgtccaagtcaaaaggataagaaggaggctaactatgttatagggacatttatcacccccgaaccaaaatatgtgaacaaaatttctaaggttggttttctactattcaagaatttgaaggggctgtatgatttttatcatgcccaccatgtgaagaaacaaagaaaacaaacttttccagtttaaataaaggtaatttatttggggcaagaaaataaagaaatcatactcaacttgaacaatgcacaaaatgaattttctttggctttccaagtggctttgtgagccattgttgtagagttttgcttaatttggtatgtgtgggaattcaattagttgctctgaaacatgatatcatgtttttagtggcctgccttcttaaggaacagtaatgtgagttgcatgttcttttagattcagtccttttgaatcttgtaaaactagagccaggtgactagaatctgtcaagtcaaagggttgttcaccttatgtgtgtacattcacctgtgtctgttcatacatggtaactattatcattaacctttattctgggtgatataatttatctttcttaataattgcttataaaaataagctcaaaatgagtgaagtatatactacttttgcaacttcctgtgagcctctatataactcaaaataaatttttttttacagtaagatcacaaattaaatctctgttttatcattggtcagctgactgctaaacctcagacttctagcagctctatcacaaggtaaaccattggtcacagtttgagtcaggcagaaacaatgattagatcaattcaagtttatcaccagtattggaaaaaaatacgaagaccccaaagcatgtgccctagtttagtgactgaatttgcctcattttcatgtgtgtttagaattaatattaacctcttcatatgagattatttatttagtaaagtctcacttggtatagagcatctccaatactctacaggcaacctgcagtcaggccctgcagtcttcaggactagcaatcatatattcagtctagttatgacagtaggttctaacccttgtgattataacacactcacatacatcgaaataagcccaaatctaatggaccagaaaatggcataatgcaaaaaggaatagctctgttccagagtgggaacttggtaagaaataataaaatgagtggcttggccaaagtaaaaaaaaaaaaaaagatacgtgttttgcttcatttagttctatttttccaactaagcttccagaggcacttttagaagccacttataatcccacatatgaagcacaaacaaacttatgcctcaagatgagaatgttttattaggcactttactgtgtgtatgttcgattgtaaggactaatattttcacctgaaaagtttagattaaagagatgttatctcactaaaaggaaaaaagtatgatgatataaggaagtccctaagaggaagcacactcttctttggaagcatgtcaatagagtttgatgtgaaaaaataaaaataacagaaatgatttctgttcctttcttaacagaacccatcttttacttcggtgatgtggaatactctgtggatgagagtgctggctatgtggaagtgcaggtgtggagaacgggcactgacctgtccaagtcttctagtgtcacagtgaggtctcggaaaacagatcctccctctgcagatggtgagcagtttcccactcggctcttttgattgttctgcaattttcaatgaccatggcacaaatttatttaaagctgaaatacttcacttctattaaagcagttggctgggtatattgtttttgctgaaattattactctaggaggtaaatctaggctttatttactactttgggaaagtacatttaaaggccatgaatcagaaactaggttacaaacgttaagactcaaaggatctgtatactgaggcctatatttccatgaagtggttctctactctcagcaaatctagtattgctgaatgttgtagcattataagcaggaaaatcatcttactgcacataatctatccccacagaaacctatgacatttaggtattatgcaggcatgtgtcttcagttggctgtctccttattttaaccatgtgtccctataaatacttcagatccaaaaggttttttccacacttcgttataaaaaagtactaactagcacatatctgcattttattccgggatccacatctccaaaaagttgattataaagtttacagcaagcatagaattcaaaatttccttttttttctaaatgaccaacaatacaaactttctcatgtacacacacatgagaacacacatgcatgtcatacacacatcatgcattcatcacacaaagcaagcacaggttataccattttaaaagtcacccttaggttttaacttttttaatgtagtggaagcagtatagtgctttgcacgtagcaggtgcccattaaacctttgtttaactaaattaatcatttttaagagaaagattcaaatcacagatgaggggagggagagagagaaataagagcaaaggggaagaagcagaggaaaagaaaaaaatataaaaagaaccacagggagatatggacatcctacaaaatgaatcaaagacagatatactcaagcaaagttgcacatttggaggtaaagtagatacaaaatgagagtcagaagagcagaaggtatgaaaacaaagaaagaagaaatattatcgatctgttgcccaccactgtcaatctttgtggatgtagtggctacagattaaaagacagttttgtttttaactactttagatataagtggaggtatcaacactagatataaccccctttgtctgaaaaatattaaattaaagatcaaaaagtagaagcttctctcattgcctgggacaaaggtggatggagtgtgggcagagctggtaccccttaaatgtgttgctttaactaacaggcaaccacatacctgagtaggatgttctacagcagctccagcaaagatacataaatacttaattaatgttaacaaaattttaaatgtctctatttcatatgtaatttataaggatcacatatttgattgatatgctgatttttctaagcctgatttttattacctttattagagaattttcaaactaaagttagaggaactatagcacagaaagctaaaataatgaatccaaagtctaaccatgaaacatggataaagttcagcagctggtctttgatctatcaccacagtagttatccagatactaatcttttgccttttattaaatgtacttttctgtagagttatgctggtctctattttttaaaagaagaattataaacacaattacataatttatgtcttataattttttgaaatttaattagtccccaactgaatatttttttgttactgtcatagctggaacagactatgtgggcatcagccgtaatttagattttgcacctggagtcaacatgcagcctgttcgtgttgtcattctggatgaccttggacaaccagcgctggagggaattgagaaatttgaactggtgcttcgcatgcctatgaacgcagcccttggcgagcccagcaaagccacagtgtccataaatgactctgtctccgattgtgagtgtttattaattttataatttacaatgataattgaaatcataagctaaggtttatgtatatatgataagcaagatgattatatatatttgtttgtttgctagggcttccataacaaagtagcactgtcggggtggcttaaataacagaaatttattatctcatagctgttggctggaagtccaaatttaaggtgttggcaggctcgcttccttctgagggctgtcagggaaggaggttccaggcctctctccttggcttgaagatggccatgttgtccctaagtctctttgcatggtgttccctgtatgtgtctctgtctaattttccccttttaatgaggacaccagtcacattggattagagcctaccctaaagacctcattgtaatttaattacttctgtcaagacccagcctaccaataaggtcacatcctcaggtattgggggttgggatttcaacatatgaatttgagaggaacacagtccagctcatacaaataccctagctgaccacacctttctcctcctgatgattttgatagaattagacagtctcagaataaaacttttattctttctctcaaaccttaaagaaaaaaaatgtgatgtcatcagtatcttgattgtgcctcaagaattcccgtcaccacagttgggtggaaccatgtggaactgcacagactcctgagtgtcaataatctttctccacttcacagcacaagacactttctgtcgtctccttcccctagacactcatcaaatttctttaataatgtgccaaaaatgctgttctgggacaaccctctgctggacacatggcagagctctctgacacgtcatcacaagggaattctgaacactcttcaatcatgatgatttcaacagtgcttggaggagtctcacctattgtcaatgagccctatacgtaattaacctagcataggtgtcacctaaaaatcacacacaccacacacacagtcaagttacctacatgatctgagtaaactatgcttgtaattatgtgcacaatattcagtgttcttcacgtcaggaaattctgaaaggctcatgactaagaaacatgtagatacaaatatcttaaggtttgtggttttatctactttttaacatttcattgcatacccttactttaccaaacaggcagagcaaaatgtcaaaggtaaggaaatcaaaactcttaagtgatttgctcaaggtcaaaatattggcaagtgactgaatggagacagaatccagttcttctcacttactttccattattctttccactaaatcacatcttctgaaatgccattttccacaaggaaatttctgttcactttaatcctttgtttttgcagtgcctaagatgcaattcaaagaacgaatatatactggcagcgaaagtgatgggcagatagttacaatgatccataggactggggatgtccagtacagatcttcagtgagatgctacacccggcaggggtctgcacaggtgatgatggactttgaagaacgcccaaacactgatacctccatcatcacattcctccctggtaagcttgaacttgaaattttttcgtgaaatttgaagaagccgaatttttactcagaaatatatatcagggaaatacaagttcctcgatatcaacaagcatatggcatggttttatgtgcaataaatgaggaaagtgaaatcgatttttaacaggttgaatgaatgcccttttggtatctgcattaacttattgatttccagtgatgtgatatatggtttattcaaaacttattcagtggacaaaagcatatcaaatgtacagattttacaatgctaggaattaaacttggctcaatgatttgtttagtaagtcaaaagttaataatactagaaactagtgttgaggtcagattaacaatgatcaaccagggcaaggctgctaatcttgctttctgaatgtaatgctaaaaattcataaataaaattgacatttgtgctttttcccttgttttctaagatgagtggcagagctcaaagacagaaatcaaagaaattccccatacgaataagtgctggtcattgcatatacttaaatatttattcacttattcagcaaatatctgctgaaggcttattgcatgccaaacactatttattgcactgatacagcagggaaaatcaacaaacttgcccttatggtgctcacattctagttgtagatatattcctatgggatgtgattgacctgctgacattattgttccaggtgagacagaaaagccctgcattcttgagctgatggacgatgtgctctatgaggaggtagaggagctccgcctggtactcggcactccacaaagcaactctccctttggggctgcagttggtgaacaaaatgaaactctcataaggatccgagatgatgctgatagtaagaaatctttttttgtttgttcaactgtaaattagaaactaaaatccagccaagtcaaggttttaagtgactcagaaaaatgcccccacctcctctgctttatgactagggtttttaagcaattgagaaacagcaaaaagacaaacaaatggggaacaaaataaaccattaaaactgataaagttgatgctggagaatatggcttatatccaaacactaattcccaaacatccatactggccctctactctatacacacccttgggtacagggggaccaacagtttcctcccttcccacccaccttcagtggcctgctcatgtgtaatttatggcacatatagagagctggcagcacatgctctctgggggctggttagatccctggaaggagctggacaacatatgccagcttttccttccacacacgtcactaattttgagtgaggggacagagagaagccaggagtgtaatagtcatttatcccctcccacatggaaacaaacattagaaatggaggaaaagcattccccttactaacaatttcatttgtctttgtttcccacaattttagagactgttattaaatttggagaaaccaaatttagtgtcactgaacccaaagaacctggagagtcggtggttataagaattccagtgattcgccaaggagacacttcaaaggtttccattgtgagagtccacaccaaggatggctcggccacctctggagaagactaccaccctgtgtcagaaggtatggggctcccagggcctgtctcctgatggatcatgccaactctgtgtttcagtgccagtgcccttaaggaaaagaagggaaacatccaattgaaatcaaaatagggcactcttttttagggggtataattttaaggggtacaagtgcaattttgttacatggttatattatgtagtagtgaagtctagtcttttagtatctccatccccagaataatgtacattgtacccattaaataatttctcaatacccacctcctgccactcccccaccctcccaagccttcagtgtttatcattccacactctatgtccacgtgtacacattatttagctaccacttataagtgagaacaagcagtatttgactttctgtttctgagctgtttcaattaaaatatagacatactcttttaaattcctctcgtttagtaaaacaaacacaatgggatttatttccaagatttttttctttttgacttacagggtatatgtgttaggacttagggaaattttgagtaaatgtgctaaataaccttctgtttgaattggctttctattagttttaccttcattgtagttaccagattaaataataatttcctatatttttctatgtaattgcaatatgcatgataactgtgataataatctattttagtttagagaacaccagcaatctaaatctaaaccaaaaaattttgtgttaacaaaggacagtaaaagtatagtgaaatattaaccacagagacaatgaattctctaggatttaggagccacttagagatgtctttcatccctctccttttgcaaatgttgggccatgtcaccatcttttttttttttttttttgagacagagtctcacgctgttggccaggctagcatgcagtggcgtaatcacagctcactgcagtctccgtgtcttaggttcaagcgatcctcccacctcagcctcccaagaagctaggactacaggcatgcaccaccatgcccagctaattttttgtatttttggtagagatggggttttaccatgttggccaggctggcctcaaactcctagtctcaagtgatctgcccaccttgtcctcccaaagtgcttggattaaaggcatgaaccaccaaactcagcctgccatttacttttatcagtaattaaaacaagtcagttctggccgggtgcgttggctcacacctgtaatcccagcactttgggaggccaaggcgggtggatcacctgaggtcaggagttcaagaccagcctgaccaacatggcaaaaccccgtctctactaaaaatataaaaattagccaggcgtggtggcacacgcctgtaatcccagctacttgggagcctgaggcaggagaatggcttgaacccggaaagcagaggccgagatccgccattacactccagcctgagagacaagcgcaaaactccgtctgaaaaaaaaaaaaaaaaaaacaaatcagttcttctctctcacttgctctctctctgaattatttgcttacaaaataaaagtaactttatgtccaatattacatttatgaattatttggagtctaattattcactgtgttttctcctttcctacctctcactatcaagagtcattagttcttgatgatcttagcacgtcaggcattcatctttatctaatttacaaacaaagctgagaaaacaactgataggtatcactgaatcagtaataaagttagtgaggcaacataaaaaatggcgtcttctacaaaggagcttgtatattctttccatataatggttataatttgatgaactactctagagcttcaaagttatccccagattattctctatgtaaaacaaaatatatatttgaaataaatcacatgtaatcccagagaagggaaaacaaaactgattagctactgaattataaaatattaaatgtctttctataatgagcagattttacatgaaagaagtgtcttttaaatattgataacatgacttttaacaaaaaatgtttttcttggaagtaaaatgattccttttgctaaacggaaacaaaattatagctatgtagtaaactgaaaaataaagtcagaaaaaagttaaaacattaaataaacctgttggtctcttttatccaataaatgtcaacatgtgttttataatgtttatattaaaaatttaaggaatagttttctgaaacattttctaatttctccttttcaggttcaaactgaagtgagttctttgcaaaaaaaaaaaccagaaaaaattaaatatagaaaaaaagttgaaattttttcatgctaaaatagtctaaagtgacagaaaaagataaatgtgaatgagaaaacttgaccaccgtccagcaagtatactatcagaaaacaataacaaatatttaaaataaatatttaattttttaaattctaagaaatttggtttgtataactcaaggcatcacaaaaccttgaatgcttacatgtctaagataagcaatgaaaacgagtaaaccaaggaaaatatgatagaaaatggaatgattatagtgtcattaagccagcaagcccattccttgccaagaaaaggctgtattatcacagcctagtgttcgtagtcttctgccatgcaggaaggtgccaaaaaactcaaaaatctctattttcttatgaaattcccagatatttaagtgttagaaacccagtttttaatgtcacatcatacaggtcaaatcaaacaaatgattagctattttcttctctggaacaagaactgtaagttctctcagggtataagaaatctgagactgatgggctcattatgatatgtgaaggctgataggaatagttgctgtatctagagacagagaactaattttaaaaagaaaaagaaaaaaatctttaaagataaagagaagaaaattgctcctcgtacctgataatttaaaaattgaagcagaaaaaggaaaatgcactggcaattcattttcttcttccagactctaaaggatttgtaatttagaattataataattgaactgcagctacatcagaaactggcatctgttgactcttctaattgggataattatgctttataggctttatattttctcctttgaaacggtatcttaaaaggtatagtaaaaccaacaaaatagtttatccatggtttacagtatgatcagctgcttaattacgatttcaataaaatctgataattgtcatgttttttagcaattttgaaatgagtggttaagaaaataattctgattttttttttaggattctagatttaactttcatgacaaagaagcaattcttttttagtgagaaaggacagggtgaagggaaaaaaatcattagcatttatctaaaataacttgtctaagtttccctgaaaaacacaaagaagtcttcttgaaatataatttggtattttataaaaaagtcaacaattatttatccagctcttctacatatgtacataatgtaaatcccattcacactctattatacttatgatcatattcattttcttgagtcctattggtttagaaattctggagaataagaggttaatttttctgattctatcccaatattagaactactgattgtccctcccataattcagcatcttttcaaactgtgggccaacgaaccaatgtcttattattaaaattttccttcagataaaatcggcattcctagcaacctggatggaactggagaccattattctaagtgaagtaactcaggaatggaaaaccaaacattgtatattctcactcctaagtgggagctaagctatgaggatgcaaaggcataacaatgatacaatgaacttttgggactccagggaaagggtgggagggaggtgaggggtgtaagactacaaattgggtacagtgtatactgcttgggtgatgggtgaaacaaaatctcagaaatcaccactcaagaacttattcatgcaaccaaacacctcctgttcccctaaaactctatggaaataaaaaaattaaaaaaataaagtcttgggaaaaaagaaaatattaaagtaaaatgcatagaataagaattagtgatgtttgttaaacatttgatttcattttacacacacacccaaatatactggaccacagtgtaaaatgtatttctcattgtaggccacagtaaaaaaaaaaaaaaaaaaaaaatagaaaacttctcatattcatatgcaaatgatttaaatctgtgatgttacatttgtagaaattgagtttaaggaaggggaaacccagcacgtggttgaaatcgaagttacctttgacggggtgagagagatgagagaggccttcactgttcacctaaaacctgatgaaaatatgatagcagagatgcaggtaagtaatgtaatgtgtatgtaaattcatggctagcagtttgtcagaggaaatgcataaaagcaatcacatagtgtacaacaaaatgaggagactttgaacaagccttacgtgaaagagatatgcataatctctttttaccacctaaatgtgttttgttctgattagatcatagtcaagaaatgtgcatctttttctttgaaaaatcatgtttgtcgaaactcaaggactgaagccactgagccccaaacctgtgcacttcccttccccatgtcagtcagtaatgattcattgaccttgggattaaccatcagagagaaagcaacatctcagagtaaagagggaactattaattcagtgccacaactcataaaacatattcgaacccacaaagcagttagctaaccctccaaatcaaagtctgtttctcctggctttatcagaatttgatgtccacagcctcatgatcaaaatgttgcagtcctaaatcttgttttctatacttacttaatttatattgtctcactaaccaggttttcctcaaaatgaacataattccacagaatgttgacctttatattggaaataatttttaaaactacgtgtctttttggaatgtattaattttttatgtctttgcttacatttactgtattacttttttttatttgtttcactttagtatgagttcaagctgggaaacgtttttccttaaatatttttatcattttgtaatctttactgcttgatggtttttctactacagtgccttgctttttatcaagttatttaaaactcaagtatgggcaatctttatcaaatatagttttgtgtcttcatcacataagatgaatcttttattattatttttatggagtagcgtatgaaattcttttgggtgaaaaggatagtcactcaaattacttccagcgatgaaagcttcttttaaaaatatacacgtaaagatagttcaggaaactatgctatgtagtcagatgttggaaggttattagggagccagggcaaactcacagcaaggtgttcttgtcaccttgcccagcagcaggtgttcatagattcctcttctgtctggaactcaaattctcccctgcctgggtttcaggcagtgccttctgcccttggctgcttcaaagagtttcttattactggcatctgcttcatccaggctcacactatcccatgacctctgtgatattccttccttcagaatgtcctccagctttactcccactgtcaaagaattgactccttcataaaatttcccttcacaaccccaagacacatttagctactgtcatcacaactggagaaaaaaaaataaattagagcccaaacacctcatgggccgctggccaacctttggattgactgccctgggctcagctgccctccctggaaccataagatgtgaacaaggtgccaaggtcatgtgctgcaggccacttagggcctgttgctctccaggggctctgagtatgacaatttgcatcataacgaggccatggggttgccagggatcgtgagtattgttctgtgtggtagaagcatcaaaagtttaatatttcactaatcagtgataattgtcttttccttctagttgacgaaagccattgtgtacatagaagaaatgagcagcatggcagatgtcacttttccttctgtccctcaaattgtatccctgttgatgtatgacgacacttccaaagctaaggagagtgctgaacccatgtctggctatcctgtcatctgtatcacagtgagtaggagattcacaaaattgaggaaaattgtaagataattatttcaaataattataatcaatatagcattggctttgttatgaagaaatgaaagtagaaaaatactacatggtttaagccttgagctttgcatatataacactaatcaaataaagctcccatttttctttcttcaccgaacaaaggttcattaactgatgtgtacatagtgtgttatctcagtctgtcaccaatagaaaaataaataagatatgaagtctgcattcaagatatttagagatgaagaaaagaatataggaattggtaactctaatataaggcaagatataaccactatcatgaaaatgatacaaattagaagtcagagctgcagctccatatatgaggggaggtttgggatggtcaggtggaattttgactctttaggatgcaagtctgataagggaaggtcattctaggaagaagggactgcaacgtgagctacagctagaaaaaaatagcataagaaatagcaaattatcactactttcaaaatttgccttttcttgactctaagtttaagctccttgtgagctaaaattatgacttacttatgtttatattacaacagcacttctaaaatcacttatacaatacatgtttattgagtcaacaaggcagagataatttggcgtcaaagtatagggagttttaaatgtcatattaagaaatttggacttcatttgttgggtagcgaagagttctcacatggaagaatgatcagaggggttaaactggcaggttaacagggcagtcgtgtgtcagtggactggaagaaaagatgctgaattagacagagaagtgctgctggaaatggaaaggaaggcatcaacttaagcaatactgttaaagaagaatcagccgagttcatgacttactggataaggggggtaagatgagcgacaggaagcgggggaggaaaaaagagagaataaggataactggcaaatctgatgattcaagagattatggtataaataacaattttacacatattaagttagaaatagaaacatccaataagctgtttgaaatgcaagattatgtttataaatgttatcatgcctggggatcaaaattcggaagctgtataaacagcatgtggaaattggggaaagcagcagtgaaaactcgatggcagagaacgggagaagaatgcgttccacctgttctacactctgttcctaacacagtcatttgttttccgtaggcttgcaaccccaaatattcagactacgataaaacaggctctatctgtgcaagtgagaacatcaatgacactttgacgcggtaccggtggctgattagtgcacctgcgggccctgacggtgtgaccagccctatgagagaagtggacttcgacaccttttttacgtcatccaagatggtcacactggactccatatactttcagcctggctcccgggtacagtgcgcagctcgtgctgtgaacaccaatggggatgaaggcctggagctcatgagccctattgtaaccatcagcagagaagaaggtcagtcattgccattttcccctgaagatcactggaatactgtgcaatattacaaatgtctactttctggttattaatacttccaatgtcccacatattccatatattttgtaagtagtgaaaaattaaaatctatttttacaaaattatgtattagaaaacaaaatatttattcattctacctttaagtatctattatatgccagacacaatgctttgtgctggcaataaaataaagaagacaggatccctgcttttgaggaattcttggtccagttgaagatgcagacacattttagtctagacagggcacaggaatgcacaggtagaagtgattagttttaccctgagtgggtcaggaaaggcttatcaaagaggggaggctcaagctgaatctgaaaagagtagaggaaaacaagcatgagcaacaactcataaaagcaagaaagaatgcgggatattgtgggaatggcaagcagagaaatggggaagcttctgagagggagaggaggaaaaaccaggagacaaggcaaaatggtatgcaaggctcagatctgaacagagctcatgccatgcaaggaaaccagctggttgttgggtgagtaggattttgctggggacgggaggggaagggcagtccagatagaggggtacgtgcaaattaacaccttggtattacaagagagactgtatttaaggctggagcaaagacacattggggatggagaataggatgtggctggggacaacattggaaagacaggaaatccactgtataaataaatccttcactctgcagaataatttttaatgagatttttcttaaaaacggttgtatatatttgattctatttctaaatcatctatttgcacaccgcattcaaaagtaaatttactgcatagaggtcatatgtcccacctgtgactactatatattcaggatcaaatatttaaataatgccttaaaatgattctctcttttaataaatcagacagcctctatgctggggcctgactctgatttccttgctattctaatacatatttgtctattttctctgttttatacaaatagataagtaattgtatctttccaagttctcctgaaattataattcagcgtcttggttcctttcatgatgttcaaatagaaaccccactattttcctaaaggaaatactggagaaagagtttcatgtccaaattcttgaaggtcactgggagatatgagacagaaagagatgaatataaaatggattataatgtataatacacatactgtaaaaaattacatctatagagaaaactctactgtacatattttgctctctgatttttaaggagactttagtttttgttcctaaaatgagcacagttttagttttattcacttataagtaatgtaaacataactaatgataagtatattattctagagtaaaaataacatttacttggtttaactacacttacttttatcctactgactttcagtcatttttactgtatctgttcatactttatatttaaatgattttgtgaatatgaccatgacctagaataaccagcacacattaagttacattgaatggtaacaaattttttctcaaagtttgaacaatccataaattgtcaagtggccactaactgtctgctgtgattacttctcaccctgtggacttctaattccttatcacgtgatgtacactcttagccatgccctactccacagagaagttgaaagtacacagaaaaataatagctcctattttctaaaacattctttaggtattattgattaccttcttttcgcataaatatggtctttttttttttcaaggtctttgtcagccccgtgtacctggggttgttggagcagagccgttctcagctaaattgcgctacacaggccctgaggatgcagactacacaaaccttatcaagctcactgtcacaatgccacacatagatggtaggtgacttgggtaagcaaatccatggaattgttttggactcctcattacctgttgtattttccttcatcttctaaataaccaagcttaaataaacgttcaatttgcaacttgagcttcaagtccttccacttctttcaactgttttagctttgttctaccctgtttttataactatggcagtgtaagcattcgttaaaattaggtagatgtaatacatatccagacacgataaaacaaaactttggtacctagtctagcttttatgaaagagtacaaatgcatcttcaatcgtaaacttgaagttacagtaaagtatttgatatcttagtacctaccttcaacatgtgttgcagttttatagctggagttttatgtctctctcaatatttatcatgtaactgtaagacatttccaagatatttaaataaaataaaaaatgaaactaacaggtattaaatattgtgtctattttctctggctaggtagccatgaccagaatgtgtgcatcaataactttatcatactttatgaatattttaccatgtgcggaaggcattttcaagttattttccactcaaatcactttatacttatagcaaattgttaataaaattacttgatatgttagttatattttatgtagctaagggagaggaaatacgattaggagctgcaacgtagaatctacctcccccagaacaagaacatctgctatgtcttcctattacaacctgagatttttctggggattggaagggcaggtggtcaggaatctgcattccttcctttatagcataatgttggtccctgaaccacccagtctgtaggtccatgtggaggtgtgacttgagctgcaaagggctgagaagggacccatcagggaaacacagacctataagagttatttcctaaaagaaagagtggtctcttctgccactcctagggcttggctttgcgttttctgaatgcactgttcaatgttcaatagccacagttctgccagaagtgtagttgaggctgaccacttcttctgtggggccggagttttgctctgagtgaatctgagaggaagaggtgtgaaaggctcaaagagaagaactggttcatagtcttttgctgtattgcttatgccagggctcaacacactatgtcctgtggccaaatacagtctgctgcctgttttcatatggtctgcaagctaggaataggttttatatttttaaatgtttggggaaaaaaaaagaagtctacttttgagacataaagatggtatggaattcaaatccattgcccatgataaagttttgttgcacacagttctgtttcttctttcacatagtagtggctttcactctgatggcagcattgaacagtcaacagagacctcagggaccacaatgctaaaatatttactatttgaccctttatggaacaaattttcagtccttagcctgtactttttaatggtggtagttttcaactttataaaaattttttttttgaggcagagtctcactctgttacccaggctggagtgcagtagcgcgatctcagctcactgcaacctccacctcccgggttcaagcgattctcatgcctcagcctcctaagtagctggaattacaggcgtgcatcaccatgcctggctaatttttgcatttttagtagagacggggtttcgccatgttggtcaggctggtctcaaactcctgacctcaagtgatccacctgccttggcctcccaaagtgctgggattacagatgtgagccaccacgcatggccagttttcaacatttatgatccaggacatcttagaaattattgaagatctcaaagagattttgtttatgtgggtgatatctataaatatttattggattttaaattaaaactgaggaattgttatttattcacttatttaaaaattacaaaaagaaatacattacatattaacatgaaatacatcctttaaaaaactatgttataaaacaaaaaaatgatgagtggcacttttatattcttgaagatatcattaatgtctgacttaatagaagataactggattctctgcttctgcattcaatctgttgcaatttatcatatcttgtagtctctgaaaaactgcatttgtgagagaatatgggtggcaaagtcaaataataacttactatcattgtgaaaatagcgattaagtcatggatctcttgaaattttcctggggaaccccagggttcttagtataccacttttttatttttttgttttttgtaggggttttttttgaggtggagtttcacctttgatgtccaggctggagtgcagtggtgcgatctcagctcactgcaacctctgccttccgggttcaagcaattctcctgcctcagcctcccaagtagctgggattacaggcacccgccaccatgcccagctattgtaattttggtagagacagggtttcatcatgttggccaggctggtcttgaactcctgacctcagatgatccacccacctagacctcccaaagtgccgggattacaggcatgagccacgtcaccgggcctggacaccactttgatctgtatgccatacaccactgctgtatggcattttatgacacttgttttcttaagagataaagaagttttaaagtgttcaaaattcttggctacttgaaagactgttaacaatgatttcgatttatcataggcatgctccccgtgatctccactagagagctttccaactttgagctcaccctcagccctgatggcacaagagttggaaaccacaagtgctccaacctcctggattatactgaagtgaagactcattatggtttcttgactgatgctaccaaaaatccagaaataattggagagacatatccttaccagtacagcttgtccatcagaggttccactaccttgcgcttctaccggaacctgaacctagaggcctgtttatgggagttcgttagctactatgacatgtcagaactccttgctgactgtggtggcaccattggaacagatggacaggtacagatttataacatctgagtttggtcactggataaaccaattggtttgttttgtcacatagatttgtactaagtcccaactccagttttccatcttggtgttgtaggtaattattgacagcaagggaccagacaactggcatggatggtgtgaaaatccgtgtctatttcttaacaatgggccagaatatacgtagtttttgacaatgggctagaaacattatatctatgtgaaaaggatgctgtataattattgccttaagctcaaaatctactctgatattataaaaatccaaatactgacttctcttcaaagtatacactatgttgtttttgtgtttatgtgtagatgcctgtgatgttgtatcatgagccacctaaagtgaggttttacaatcctgggagtcagcctaatttttctccctcttttctgactttcttcttcccctacattttacaaaactttctctgcttttagcctcctgttttactctccttctttttctttctgtttttctcctcttcttcgctttttgattcatttatctatcattaacatagtcagaagtgtttttattaaaacttattgttatttgcactctacagttactgattcttcttcatactacacattcacacataaaatacacatacacacacacaatcctcacccccaccccatcatcagcaacaaagttgttaaaatgataaggaagcaagatcttcttgtgggttacaatagagaacctaaaatatgtagggcatgatttaaaattgttatgagtatttgaactaaaagcaatgctataatcttacctggactaaataaggagttacataagtaggtttatgcattgaagtgttgaatgatatatagactatataatgcccttccagattgagctaaagttaggctgcccttttttgtgctatattcataaggtgttgaatgaaatatgtaacaaccagtagcaagaaaaaactagataactagtatgagataatcccacagtaaagctgtggactttgacaagttctgctggtgttgatgttgaattggactcagaggtggtgagacatgaccatagccaccttgtcaaaaagcagcaacatttagtaacttacagggattgctaaaaatgccaatagaaatagcaatagagaagcagtataagatggtggaatctggatattggaatcaagcaaatgctgaccaaaatttggctctgatagtttctagctgtatgtctttgagcaagttacttaaacacgtataagtgttcatcctgtagattcctctttcctaacctgtttttgccacctgaaagaaacatggaaaaataaagattcaatccctagaagaaaaataaaggctcatattaacaaatctacctctttttctttatagatcaggtatctctacttccttcatgtcttccttacaaagctgccttcaatccattactaaattatttctatttcctttctggttgcttttctctcagattgttgcttacatcacagcatctattggtataaacaaaattggatatagaaataggattatgttgtagttctcattccttgttaaaatcgtttcatacgccaggagcagtgacttcatgcctgtaatcccagcactttgggaggccgaggcgggcagatcacctgaggttgggagtccaagagcagcctgaccaacatggagaaaccccgtctctactaaaaaaaaatacaaaaattagctgggtgtggtggtgggctccgtaatcccagctactcaggaggctgaggcaggagaatcacttgaacccgggaggcagaggttgcagtgagccgagatcacgccactgcactccagcctaggcaacagagcgagactctgtcaaaaaaaataaaataaaataaaattagccgggcgtggtggcgcatgcctgtaatcccagctactcaggaggctgaggcaggagaatcgcttgaactgggaggcggaggttgtggtgagccgagatcgcgccattgcactccagcctgggcaacaagagtgaaactccatctcaaaaaaaaaaaaaaaaaatcacttcatgctattgaacttctctgtggatctcatctagtttatagtctgtttttacccttaagaatgttttctatcttctccacaaagtggcagcacttctccgtcttttgtccatgttacacaggtagccttttctatcagtaataaaaaccctgcacttgcctgcctaagctttatcctattatatctgtccacttttttaatgtagcaaggctgttttattttgaatgcaaagcctgccctctactgtgttcattcttcaaatcaaatcttactgtaaaatttagatcagctaaagtgactatactttgctagatttttaaaattccagttcctttatcaaattatttgtgctcagtattttttttcttcctatgactgccagctagaaaagtcattactctgcttctctattggaactgacaacagtcctactccattaggtgaaaatcagcaattgtaggttttcagttaagtttttcctgctagaaaagcttatgttccataatactagaagagagtgcaatataagaattacaacataattcagttcttaatagtctgtgctactttcttaaggaagatggctaacttgtatgagttccttctgaaagacttctgcttttgcattgttaaacattaatagcataaccatcatgatcaatatcatagtgatgaccagattcagagtaaatcattgagattttaggatcttgttataaaattctaaaatccttattgtaaattaaatggtaatacaatttaataaaacatgttgcttactctcttgaagtgaaacttagagatgttgtgttagtcagggttctccccagagacagaaccaatagaatagatagatgagaagggattccttatgagaattagctcacgagatcgtagagactgaacagttccatggcaggccatctgcaagatggagaaccagggaagccagtggtgtggcccactccaagaggccaaaggcctgagaacccaggttaagtccccaagtctaaacaccagagaactgggagttctgatatccaagggcaggaaaagaagagtgtcccagctccgagaaagagagagagataattcacaaccactctttgagataagtactatttttgtccttttcttttccttttttgtctatctaggcctcagccaatttggtggtgcccacttacattgagtgaggatgggtcttccttactcagtccacggattcaaatgccagtcttttctggaaacactctcatggacacacccagaaataatgctttacccactatctgggtatcccttagtctagtaaagctgacacctaaaattaaccatcatagatggcggtcccattttcttctaccttcttcactgaggttaagtttctacttttccccttgctgttgatagtctcctacaccctcacctcaacatacacgcacatattatttacacataggtgagggagaagaaaataaaaattaaagtagaagaaattcaaccctctgagatattgccctaattttcctccattagttttggcttatagtgaagagaacaaaatatctaataatagtactaacaataacagtaagcacaatgatagttgtaatagcttacatttattgattgtttactacatgcctgccattcctctaaatactttgtatatttccactcattctagcctcacaacaaccctttgagataagtacaagttttgaagcaaagagaattcaaataactagcccaggttcgtgtagcttgtacacctatgctgttaaacacatcataatgcttatctgggcattaaattgaatgtgagtgaatgtgagaaatggatatggtcatggatgcaattgcaagaaagccaggtgaactttttcctttgtccttggtacaagtatgctgcctgacagcattcatgaaaatacgtgccagataacatccacacccactgttggtaaaacggtgcaaatccatgtcctaacaacagtggtctacagcttcatctgaatacaggcagatcagtgttgaatgcaagcatatttcatgagatggcacctgaaggaaagcaaagtaaatgcttggtaaattctactttatactctattttggaatgtcatgagagccttccaaacttttgcatttcagcattaaggatgggaaaatggagaaaaataaaaagcaaaccatcagcacagactccatgtgcttcagaggcttcgtggttttattgaccaccccaggaaacagcccctgcagcaagccagtgctgacccaggtctgtttgtcctcaacaatcccacagagcccaggccaagcgcctagcagacattacttgccctcctctagtcctttcccaaatttggcatctcagctcaaggtaatcactgtgcaaacacattttatcaactggcaattgcttttgctaggaacaacatgatagagaattgattttttaaatgtgttcttagtagctaaagctaccaccataaaatattgccaagtccctgcatttttctttgtaaatgaaaatcaacacactctgtaagggttttctgccttctccaacctcccaatttcgattatttaccttattagttaacaggatagttatctgttaacagcaatgaagtgtgattaacttttatgcagctagactacatctagcttcagctattattaaaactatatctgattttgccatctcatttatttgtacattcattcattaaagaaatattccatgaacacctactctgtgccagggaacataccaagtactcatgaggacaccagacatgaagcttacggaggaacaaagtcgttacaagagtcagatcatcactcataaaagttaagaattttacttgccaagaaaaacaaatttggaatttctctaatgatatttaactctaaaatcattttaatagtttctaaaatataaacacagataaatagcaggaaaagcaaaatagagatgaattaaataaatgattccactctacctttgtgtgtgacacctattttgtaaataaaatttaaagttgtttgggttcacaataaaaaacactttagatgcaaaatggttattaaagttaaattaagttcttagaactatcagatagtttggtagtttttctcttgaaaacaattttttaaaataattgaagactgcagatcatttgatcttttattgtcctggctagctgttttgcgacatagaatcttaactctcccatttgtttacaggtaaacagcgactgataacatcgttcagtgtgcatgaataagctacagaaatgcaaccccaatcacagttttcacttaaaacatgaaattataatgtacttatcagaagacatagaataattttggaaaagtaaacaaatttttttcttagttgctttagggaataattatgcctcttttttactatgtatttgatttagatatatgaaactttgaggctggaatatacttgaggtcatttttccatcccattgttttatactttgtacactgatactcttttatatgtaagccactctcaattattttgcaggatatatacttaccccagtgtgtagcagaataaatttgacagtgtgttactttttccatggtatttgcattttacactttccttttaaatatggaatttaaagtattgcttgcctttgatgaagaaacttcaaacagcaatagggacatatgaaatcactcattgtgtctcggtttctttaagatttgacagatatttatttcagtataaacaaatacctcgaaaagtcctgtgatacaggctgaaagaaaattaagtgctttttaagttgacatctaaatgttagaatgattgcattgcactcttcacttttgaagaaggtaggtgatctagatggtcaagatagtttcatttaggctccagttcctccaggtagagattctaagtagacagaaagaagacctagccatgggtactaagaaaatgcaatggaatgctgattctgtgtccaaaaatgatcaagctctagtttaccacaacatcaaataaaatcaaatcagaattagttggggagctgtactccaagtaacttattcataggaagtgagtattagtaattccctccaaaatagcatactcagtaacatttgatggatagaatataacattggaaaaaattattcttagcacctataaagcttaattggaaatctattcctaaaacctaattattttttaaaatcatggtttattaaaattgtaaggtaaaatattaatcttaaggactagtggcatatgggttgacttagtcaccgtccatttccctgcacttcaaaatcaattgctcaatgaggtaataacagccgcccatagaaactactgtctcaaaggacttttaatgcaaagcacctctcctgctggccaggctagcaggtaagagggaatgctaactactatactatacagctaagaatgaaataactggtttggttgatggttcttttctatatatttttattagggattcaggtcatcatttttgtgacatgagcagtttacttttaacttcataagaatgttctaaattatagttctcatgatttaaattatttgctaactcatgcctgtgattcttgttgtgagctgtgtggaaggagaactagaccataatcagacagcctgactcaaacttctatggagtgtgatctgacctaagtcctttcctcttgtgtagaagaggctagttgtatttgtcctactattgtgcagagctattttgagaatgaaatatgatagcctttgttagatgaccttaggactgccttcatctttgtttggaatacgatgaagtaagacagaatagaaaaaaaacatgggccaaaagctgagttctgatcttgtccgagccattcaggaggtttagagaatactgtgggacatttacctttttcctttgagtcttaattttatctttgtctctttctatccgtcatccattgaccatccaactatccatccatacatgcaaaataattatggtggagagtgaaaatattaaatagtgtttattcagaaactagtacagtttctgaaatatggtaagtactcaatatataaatattagtttatcctccactattcccaacccatctgctaaacaccagaaggaggaaagtataaaattcaaggcaagacacttcatttcaactaattattcttgagatattataaatgttatatgttattagtaaatatatttgcttccagatctatgtttcatattcccttaataaaaaagtagctcatagcagcattttttataatagccaaaaactggaaacaacccaaatggccatgaagtgataaatagataaatgaaatgtaatatgtgcatacaatgggctgcaattcattaacaggggaattaagtattgaaacgtgctcaaacatggatgcaccttgaaaacattatgctaaatgaaagaaatctatcacaaaaaaacacattttgtatgattccatttatatgaaatgtccaggatagacaaatacataaagacctagtggtttccagggactgacggggaggagggattgggggtgactgctaataagtacaggcttccttttggaggtgatgaaaatcttctaaaattgattgtgttggttgcacagctccttaaatatactaagaaccattgaactgtttactttaaataggtgaattacatggtatgtaaactatcttcataaaactgctctaaagaggattttgtaagtatagtatgctcaaaataatgcactgtcttaaggatttctggtacatatcctttgttgccaatgaaggtaattagtaacaactatttaatcgatccaaaattaagtgaggggaaaatagtgttataaaatgctgtcatttcctcttctcaatgattactcaaaatcttcagttaagcgaaaagagaaaatggcttgtacaaaattaggcccacttagttaacactgagtcatgttgattgatgtaattttgttgttttaggtcctaaacctagtgcagtcctatgtgacccttcgagtccctctgtatgtttcctacgtgttccattcccccgtgggggtaggaggctggcagcattttgacttgaagtcagagcttcgtctaacttttgtgtacgacaccgccatcttgtggaatgatggaattggcagccccccagaggctgaacttcaaggtgagttcagaagacttggaaaattctatagttttgtaacctatttaaactatttaagacgatttttttttgccattgctaaaagtagtactagcaaatttcagtatattttcattttctatctataataagataatttcacctttttcatcaaaaaactctttaaaccatattagggctttaaattttgtgcaatatgtgattattaaatatgactttatatatttcatggatattttatccttgcgatctattttaggtgattaattatttatgtgttacataacacaacatatatatttttctgaattctagaaaatggatagaggaagctccaacgaaagcaagaaatgaccaagggaaaaagttacacatttttatttctgaaaaaaagaggtgcatttaaattaaatacaaattatggcctgaattctagtcatgactctacaactaactagctgtgagatctcaagcatattgcttaacctttctgggacttaactttttctgaatgatagacacaacttctaatatctctttctgatgtaaaattctattactctggggtactttagttgaatgtctgcgaactcggattgtgaatgccactagttcgagttcgcgagcatttgcaaaacttggtttcaatctccatgttagactcatagttcaaagtccacaagcatcaatctaatccattagtaggacgagtgctttttctttttcagacatgtattactgttccgattccacaaacatccatagtgtcatgccagtactgcattttactagccagcaggaaaacagagttaatagtgcacctcaaatgtaaatctactctcttaagtggattaaaacctatttatgctctgttcattttgttgttgtctttttttctccatgtttcattttgaatagtttctattttagagctatgtgacaggtaatatgataaccctgagttatgattccaaattatttcaaatgttttaagtccgtgtcttgttttagaagatgtatatttaagttaatcttaatgaggatttttctgtggttcccaacctccacataggatctcttgtttccatctgatttctggagccaaattttatcaaactgctaaatttcttgggaaagcttcagaggtttctttaagtctataaaattaggaataattctggataactcaaacctatttctatttacatgtccgaatctccatcattttgacaattttgtcatgcctctcaatttacagcttcatttttataaactcagattttaaaaaaacttggtctattgtaagtaatctgtgtatttcatagtgacttcactcatgttacttaataattcattttggctcccttttctgcttagaaaagaaaatgaagatacttctgcctctgttattcagaattcttctgataataccctttgcccagaatgtttaaagacaagtcaaacctgaattaatttttggaaggaatctgtacataaggggtctctggctacatatattttcattcttggtactctccccattataggttctctctatccaaccagcatgcgcatcggtgatgaggggcgcttggccgtgcacttcaagacagaggctcagttccatggcttatttgtgctgtcacatcccggtaagccccgttatcttttaacaaccactcctcacacaaaaaggaggtagattttccatcttcacacatttcagcgtgcttctctgttaccactgaagcccttaatctcaaatgaattgtacatgtgggattatctccatgagagcttgataattgttcagcttcacctcataatccacaaaattatcattatgcagactttcagagaaaatgcaaaataattagagtaaaattaaaaggaaaccctattgagttcattttaagtaaagttttccttaaagagcataggaataatcatttctttctctgctttgcttccattgtacaaatcgaattgcagatgattcattcagcaagcacttctcttttcacagctttttgctaggtactgtgagaaacccttttaatagggtcagaggaggtacttcactttcatatttaagttttggacatgttaattatgtttaataagtattggctatgcaattttactaactgtgattcgctgtgctttgaatatcaacaaggcagcagtcgataaaatcccacgtctaacttcatttgttttttgtttttttttaacaaggacatttcactagaaagagcttattttttatttgactctccatattaccagtttagtaacatggagagtcaaataaaaaataagccatttttctgccagcttatattagattgggaaagggaaaatagttcactcaacatctttatagcttttctttttctggacttgaactctaacaaaagagaatagggctgaataattaggaagagaaagaggcttcattgtatttttatggaactgagctacaagaaagaaagaacccaaaaaaatcattttgctttattgtatttgacagttctggaaaatgaggattttctggtctatacagttttcttctacatgcctacctttctaataaactgaatctttgtgtagccatgattgcaggcaatctaactaaaatcagactccattcataaattgggtttgcccagctgtgtggatactaatagactattttaagttcagctcgtaacttcagtgcacaataaatgcattcacatcaccctttattgtgctgctgtgactccccagaaagtagctctgaacaatttgagcatttctgtacaattatcttttgacaaaactatagagcagaaacagtactgaagtaggaatcagaaagtcacatcctagctgtgtgatctttggaaagtcacacagtcactcacagcccagtttcttcatctgccagaggaggataattatactaaccatgactgctttgcagccttcttataaaaacagaagcaaataatgtatgatcatttattttgaaaactctaaactgttatgcactcttttaattgaaccactatatcattattataattactggcactttcctagcatcctttacaagctcagtgatcatgtcagctgatcatccaggcctgacattttccctccgcctcataaggagtgaaccaacctataaccagccagtacagcagtggagctttgtctctgactttgccgtaagtgactaagactcttaattaattttcttctgctgctgccatctgattacacctcagatttttaaatgtaatatatcaatatcttctcctcaaaggtacgtgactactcagggacctatactgtgaagctggtgccatgcactgccccatcacatcaggaataccgcctgccagtcacctgcaaccccagagaacctgtcacctttgaccttgacatccgattccaacaggtgtggcttatagaattactatcttatgacttgcagaatcccactttgtttttcatttattagtaaaaaaaaaaaaaatccacacgtgaatgactttaattcttgcatgctgaaaagaaaagaaatcagacagttaaggaagctagggataaaagaatgaggagagatttgccctttatctgttgttagtacaggatgtaaaattcagagtttaaatgtatgcaatggttatttttttcttatctgatcttatcttgtgtcctcctgaagtttgctgtcttggagatttgagaattttccccgcacttctgcatttcttttcttgttcttctctaaagagaatgaaatcctgtagctcaaaccacctcaaagtacctaattgccattatgtattataaaaaatgtgatggcatctttttttcaagaatttttactgttggccttctactgacaatgatatttacaagtcctttatataccccaataaaccagtggaaatgagctcaagcaatgctgtttagtcccattcaaaaaatgacttgatcccaccagttttgccttctcaaggacaaaagcaatgttacaactctctgagttagcttggtagggtgtgaaaattgcgatgcagtgtttagtgttctacagtgtacggtgaatgtatgtatctgtgaacagtatgtttgtgcaccatcagaaccactgatgcataaaagaacttttacctttggttttaggtcagtgatccagtggctgctgagtttagcttgaacacccaaatgtacctgctctctaagaagagtctctggttgtctgatggatccatgggattcgggcaagagagtgatgttgcttttgcagaaggtatcactttacaaatgagagggatgctctgtttgtcatgtatatcttttgtgctttgctttttggggattgtgtttgagggggcaaattatagctttttttatggttttgagaatgtaactgggtctttacccactctggctggtgtgggaagtcgttgcgattgggtatatgtaactgggtatcttttttttctgaggaagctaatctctagctgtcttacctaagtgacttttggaacaagtctagatgattttctcgaatgttttttttcaatctgtgtaaacttaaatgctgcagctacatgagactgtaaatgcctctcaggcaaagattgtgcctgccttactcaatggtgtatattcagcacccagcacacatacctagcagaaatacctggcactcatggtaggggttcaataatagttatgaaataaagaattgaacaccagggggtttcattaaaccctctttcagaaacaaataacgttaattaggctttgtattgatactttctttcttagtgttattctatattgtatcagtatatatcttatcaacttatttttgtaaactggacttggaccacaatgggatattattaatgccaaattataggccagatctttgaaattattcacactagtggctgagcatctgagactcaataaatctttagtcacttctggtcagtctgcaaagtggtcttacctgaggcctgagaatgtaccagatcttgaagctcatgcaaacaggccttcaacatttgatagtagatgagggtggcaaggaaataatctctgtgtcctcattgtcataacctgtttacagtgtcacgttgatataccttatcatataacagaaataacatttccacatctctatttcaggtgatataatttatggtcgtgtcatggtggatcctgtccagaatctgggtgactccttttactgcagcattgagaaggtgtttctatgcactggagctgatggctatgttcccaagtatagtccaatgaatgcagaatatggctgcttagccgactctccttcactcttatatagatttaaaattgtggtaagtgctttgacccaaaaaatgagctagatagatttttcaaagttcagcctccttgtcttatatttaaaaacaaggctgggcacagtggccacactatagtcccagcactttgggaggccaaggtagaaggatcacttgaagccaggatttcaagaccagcctgggcaacatagtgagaccccatctctacaaaaaattttaaaaaattagccgagcatcgtggcacatgcctggagtcccagctacttgggaggctgaggtgggaagattgcttaagtcaggaagttcaatctatgatcatgctactgcactctagcctgggtgacagagaaggtccccgtctcttaaaaaaaatagaaaaaccaacaaaatgatcatttttagtaaaccaaatggtgacattttatagtaatttgtacttgcacaaaacaaatagagaaacatgctgtcctggcaaaagccgtggcattatctacagcaatcaccactttccttactgcttaaaggacaaagctcagccagagacacaagcgaccagttttggaaatgtcctatttaatgccaaactagcagtggatgaccctgaagccattctcttagtgaatcagcctggatctgatggatttaaagtcgactcaacaccactctttcaggtaggccaaaaacaagctcatttgtagtagttgtgtacccacatgcaagttatggaacatttatatgcctcagatgtctcatatgtaaatagcagtaatagtaatattgcatacagttaatgggaacattgaataagatatggcaaataaactacataaccctatgctgggcatatggtgagcactccataaacccagcgtttattatttttgttagcaatatatctggctttcatagctcttatcacttttattaatgtattaatattattttaagactatgtgtaatgaagagtcttatttagcccagaatataaatctgtgtctgacagttgagtaatctgcttttcttattcaaaacttccttcctgctgacttttcaccaatatcttaattagagtgatcttgtgtgaactgctgaactcaggaaagcaattgtgcacagctccactctcaaagatttcagaaaccaagatacaaattcctgactcagggatcaaaggtggagggaaacacaggcagctgccacaacactgagcaaatgccacaaatttcaagaggtgcttacactgcaaatctctgccgaagcaagtgcggcttttaggatatttactgaaaattaacccgacaggatggcctggagaaatgtgttattttcattcaacctaaggaaggatcttaagaaagcatgtttgttattctcaatcttttcaaacaagaagttgaagtatgatatgttttatttttatttttgccattaaatctcaaagcatctgaccttcctaaatcttgcatgcttcaaagactcatcagaaaattcatccttttccaaagccccagaaaagcttgaaaattgattttttccccctatggtcttatatgcaataagcagcaagacacagtgaaaagagtcctggggttcagaagatttgagctgtagtcctgcctctgccactaactggttgagtaacattgggcaactcacttaactgctgcatattctaatttactcatttttttagtgaataagctagactgtataatctattaatagttctttagaactctctcattctatgacaacaagtatcacatattcactcccttaagagttgcacaggatatatcacagagtgctttgcacagagccttgcacctagtactcattcaaaaatattaagtaagttaattctgcagactaaaatcatttattaatatctctgccattaatttctcttgcaaagagtcgtggattagattgacatggtatctagtatttcctaataaatagagttgtgctttctaggtcgctctaggccgagaatggtatatacatacgatctatacagtgagatcgaaagacaatgccaatcgaggtattggcaaaagaagtgtggagtaccattctctggtgagtcaaggaaagccccaatccaccaccaagagccggaagaagagagagatcaggagcacaccctcactggcatgggagattggtgctgaaaacagtcgaggaacaaacatccagcacattgccctggaccgcaccaagaggcagatcccccatgggagagcacctccagatggcatcctcccctgggagctcaacagccccagctctgcagtcagcctggtcactgtggtgggaggcaccacggtagggttactcaccatctgcctcactgtcattgcagtgctgatgtgcaggggcaaggaaagtttcagggggaaggatgccccgaaaggctccagcagcagtgagcccatggtgcccccacagagccatcacaatgacagctcagaagtttgatgactgcaggtagaattcaaccttttccgtaagtgcctcggaaaagatcacaatggaaccttaaatacttctggtaaaccatagagaatggaggatggctgtgatgaagctgcttagagaatatgactgtactaatggagtttgatttgaattctccatactcttttttgcatcaaaggacaaattaaggcatctttcctcttgccccaaaggcagcaacaacgtactcatatgtacacagagccatgatgtgaggaatgtactcctcattttagacatattctctatgcagtggagataaatctattaaaaggtgctaacagactctcttacaagtgtaagaggaatctactgttgctatgttagtgtgaatgttgaaggtgcaattatcacattgtttattaattgtataacagattattactagaaaggtttttgttgctagtctggaaaactggtgaacacactgtttattatgacaagttttcaaataggtgaagacagcatagaattatgaccagggtggctcaacccacaaatcaactgatctactacttgggagacagtggaaggaaagatagagggaaggaagttcactcacttgaatttgaattgcttctcattctcatcagactctccttgttttgtttgcatatttaattttaaattaaaccaaagaatatgttaattctgaaagagatttttaagagatgctgctctgttttggcatatagtgagtaatggtagagctcttgcatggtaatataccttattggtgctcaacatttgtgggaaattagagggttggtgagattttggtgatgaataaatgccatagagttagagtcactacaagacaatgttctctaagaactgagcctagatgtttgcagtattgaacccataaatgataataagaaacattgttacagatggtgaagggagaaagtggtatttattaatataatgtgtataatcagagtgcctcttatacatactttatagaataaaggaacattttgacagatgaggttatccctcggagtagcgtaatcacacaataacatttagaacttaaattggctacaggacattttattagctttctatccagcatctggtccaaacgatgggactctctgcaactatcattccagaaatggtcttggaggtggccagaatcattgaccatatttttatttggttcaagaagacatcgctctggcatccccagttcagtgaactggtacaatgtggtccctctcaatatttaaaaatataatttgtaacagtgcttaccattcacctcccaaagccaaggaacttgagtgagcttccttggcaagcctcccattgcctttctgcatcaatgtgtttgttaccaaatagcagaaatttcgcttagaaggggaaaacttcagctttccaaaagctagtaaacatgtttcaaagaaaaataaggtcaggagaaaaagaataatgcctacagattatccttcagatgctggctagaatcccctttgacttctagccataagctggccacattggacatcttggtcactgcagaattttaaaaggcaaacttctcagaacagatgtgcacatcttaatttggtgtctgtaagtatcaaccatttcttgatcaagataaggaagcaacactgatactgagagagaggtcatatgtccaatagttgcctttcttctcttaggcagctctgcacttcatgttcagttttttaaaaatagactgtagtatcctttcattggagaatttacaaaaatatcatctacagctcaaaagtcccactaacggcttatatgaacagaaagtactgtgtagcccaggagtttatttagcaagataaatagtggtaatttcttaatcattcccctttcctttgctttaccttctggcagatgcttagctacttctttggctacctcataatttgtatgggaatgaacatgaattagggaacttcaaatagtgcgtagacttttccctacttaccattgggttcaattgatgtagactgttagagcaagtatactcaatcaacttgctgatattttagtagttaacagcttccgagcctatcatgcaatttggagtctgtcaatgaatatagcaatcggtgaagcattactgtacgaagtctgttttcaggctttgggtcaagctggttttataccaaatttcactctacaatgcatattctaatgaagctactttatataaattggagagcttataaaatgcagaacatttctatcctatcctaccaaatatttatccttctctgtcctctattctcttactctcctctctccctttttccttccctttattcccttgaaaaaagagaatctgtgggaaataggcagatatagctttttaaaatataaagtacttgggattttgcattatttttcttaatatctatttactaagtatgtaatttaatatacattaattattttttgaaactcttgttagtgggaagaatatggtaaattttttgttaaataaaatagacccttatgtttagcattttgtttttagagaactattctggtactatcagaacaaatacataaaataacttcccatagagaacaggatatagcaataatagctccttagatactcagtggcttctgactccaatcaaggtcttgttgatattatatagtaaaaataaaaccaaaaataaatattattcaagtggctcttctaagcatgtgaatcatgaagcactgaaatatgtattttaatgatgatcttatttattcccatttttgcccttagttaacatttactggtgctcacctaggattggctattctgagggattgcatagaaaccaagctccacttgctgtccttgggaaggttataactgaatgcagctctttatttggactaaagtgtcaggatatgcattagattctctcctgaaccaaaaacacaacagtcattatctgtgaaccataatttaaaaatctttctagaataacaacagcagactccactcttgtttgtctaaaagagccctactgggtatggatcattctgatgacagatttatacaaaatgattcaaaccagtaacttagtaaaattgaccttcgcaaaacctcactgggggagtgccttgtagagctgtgggtgggactgcacattcttttcctcttagtaaaagataggcccactttattccaagaataacacttagcacataaactcttcttccagctcgttagcagcattagcaccttctgaattccaccctctcagaagaatccacagtgtttgaacaatttgcataaaggtcagctagcatcctgctgccaagccactgcatagcatttgtgataagaaggaccaactctaggctcaatatgaagggatttagttctgtaagcagcaaaaaagcttctttatcaagtcatcttacctctaattcttttccagtgtgccaactccaaagtcaacattaaaaatgtaaatggacctgtgtaaatatcacagagagcttttccttatacatctcaatgctgagagttaaaatattcccaggttaaaatttttttaaagtaccaataatagagctaaatacaatgacatttgcttttaaaaggtggatattttatttctgctttttgaaaatacttatttagtattgacttggaagccaatttggtcctttaataagtaaagaaaataatatgtttaaaaatgtaaatgttttacaaatttgaaactttcataattgtattaatcagaaaacaagcacattgccattctttgaaactcatgtttctagacatgacagcagtaataaaaggatgaaaacaagtgtcttcactaagcgtatggccaataaatgggacccaaacgttcaatctgttcagtttaccaaggttcagaaatacgtaatttagcaggaaactataaataccagtgctatcacagccacacatacacacacacagacataaaataaccaaacatctcatttctaggaaagagataacactaaaggcatcataggtttaactgaaatacgttatatgaagttttacaaaaaggtcaacagaaagctcatttgtgaaaacatactctcatgggagcttctttaacattagttcagaggttaatatatttcctggaggtgttttcctagaattgattgcactattgcatggtaataacatttaattgttaaggaaacattatatataggttcaaattatcccttaatgttgatttctccccttttccatggattttgatactaagaaacaaaatgctttgagattttggtaactattttgattttgataaaacatgttaaaatagaaggacatgatatttttctatagtttccatcaggaagagtacatcagaaacttctccataaggaaagaaaactgactctctcttgaactagtgttgacaaaatacactaatgtctttcttaattttattttattaggagaaaaatcagaatattaaatttgcaaacttttgaacagcagtaatagctccttagacactcagtatctttcttccctatctttcaagcacatttaatttctttcccctggtatttgtttgctttgtgttttttcaatattttgtttgctaaagaacaataacaacaacaaagctggtccagccctgacacctacttttgctttttttctttctttcttttaatttgttgaactataggtttctttctgagatgtatttttcattcttccaataatgctctctttttcatttcaaaaccattaccactttcaatatgtaattaacatcctcattcatcagaaagctggtaagtccacacagcatttgtgcagtatcccttctgtgtaaaatgttaaggctttcagatgaaagaaaaaagaacttcctgcaaaagatcaaaagcatcatactaaataaaatgatgacaatatgtgccttgatttttctctcaatggaggttcaacattgacatttaagatgtaaaaaaaattactttgatggtttaattaagaataataagtcaaatatcacatgtatgtagttcttttggatgaccgaataccttaaaatgaactaaataactgaaataaagtgttaaaatgttaa

SEQ ID NO: 281 - DNA, 163489 bp, Homo sapiens
aaaaggagattgtatagaaagttaggagctgaggggctggtgccacgttctaaaagaaaacaggacagacaaatcgttttcatctgagaattgtttttggagaaacactagagtcaacgatagaataaatcagagccaggtgtgtatatatatagggaggataaaaacaccctggcggcaatgaaatttaagaaagagcaatttaagaagaaaggggtgccctgtgtgattcctcgcggtgggatagagggagctgaagtgtaggattttccctgatctttcagagaattcagattcaggaggcctgacatttaatctggtctgtgcacggatttctccggcttggttggggttctgcggaatgcaacgctcctcgggcgctttctgccttcacctcttccgtggtctttgatccccagtccccgcgcagggccgcagcggagccaggtcgtgcgcccatttctcgcacctccacgagcccgcggctggcgccaccgggcgcgggacgcggggcgcggggcgggaccgaggcggggcgctccggcgcgcagcgggttaagcggcgagggcggtggcgaggggcggagggagtgccgcggctcccggctcccggctccaggcgcccgcgtcccggacagcagcgggttaagtgccgcccgcgcggagacggctgagtccggagccgcggctccgagctcgcattcggatccgctagagcaggaagatggcgacggacggcgcgagctgcgagcccgacttgtcccgggccccggaggacgcggcgggggccgcggcggaggcggcggtaaccgagttcccggggcgggcgcggggctagtgtagacgcgggccgggggcggcgccggggtcccagccggacccgacttcgcacccccggggcgttccgtaagcccgggactctccggtgccccttcatcggggccccccttcctcgggatgcccacacggcggaggccgcgggggggagcggagcggccaccctggctggggatccctcctgtcccttccgcgccccacgggaagcggccccgggtcgcccggttctcccagctccctgtctgcgtccagtgcgacccctatgcccactccctccgctgcggtcgcttctggccgggggagaaggctgggacgtgtttcctggcgaatttgaccccccattgttcacctctcgctgcgcgcgtggttgccagcgcgtgtctcgggggtgcctggtaccgctcagcggacccgggagagcagcttgggggaggtgggccatcgcccagcaggtgtggggatgcccattgtgtgcatctggtcctgtgccttcgggaggcccactgggagagggccgtgtccagatgtgggcgctgctgccgctgaggccagcgctttaggtcctagcagcctgctgccccattacttggtggtagtgattggggtggggtggatggattggttcttcccgagacgatgctcaggagaggtggaggttctgcacctggtttcaagacattgttctccttctctggagtctagaggccgaatgcgctaccattcttgactggtccttactttcacccccttaatattccggtgtagagactcgctggtggtttccagcctctactttggggaagggctggacccacatttcctgggtggaaaaggttctcggtgtttgggaagcagcttcgcaggagctgcaaggagctgcagagaaaggcagatctgggagcgcctcccactcttggccagatctggctgctcccgccgaaggatggggtgggatggagcgagcggggcgtggacgcccccctcttcctatcaagacctgagcagaatcagtgcaggagagggcagggccgggcgtaaacagcgggggccgctttaacttcctcccaccctctggaggtagggctttctggagagggagaggagagatgtggaggaaggtacttggggtgagaggagctgagcctggcaatggaaggagaaacggggaggaggactgctaatttccacttgtaaaactggcaagttttgatttgaacttttgggaaaattgagtttccattctttgcatagaaaatgagaactttaagatttcaaacgaaacctgcccacttatgtgaatcagctcccctctgtggggcacagtaaggaaactagctattgagacaaggctctctggcaagtggaaatgatttggtgccttcatccccaaaaggtgggaaggggaaggacgaggaaaaagaaagagggtgtgtgtgtgtgtgtgtgtgtgtgtgtgtgaaggggaaggacgaaaaagaaagagggtgtgtgtgtgtgtgtgtgtgtgtggtgtgtttcttgttccccagaaaggttgaatttgtttacttaatccactcagaatgggtttctgttaccctcaatattttaatcacctgacaattaacccaaacacaaacatctgactgatggtctgtagagctgatatatagttttgtttggttagatcgtaaacaaaacccaggacgccaggcagatttctgtgttaacaaggtcagtgttccctctcttctgtttaaaatgttcaagtctgattttcactgctgatagttggggatttgataatttcacccttgttaatgggcagagccatggaaaatctgcgaaagtgaaccttctttgctatttccatagaatcctttagggttgcgagatgcaataaggattcttcatctagtagtttaaaaaccagtaataatttctgaatttttagtaaaattttgatgatggcttttgtagtaaattgggccttttattttagttctccaaatagttttgacttaataaggcatggttctctcatatcagccgcttgacctatagactgatttttaagtgaaaggaaagctagtgtagaggagtgatatgtgtcatcacaattgctccttaaaaatcagaggcgttttatgcattttgggttcttgttgactgatattttttattttagtgaacaattcactttgcattttggagatttgttgactttcaaattggtttacatatcgtgcatttttatgtatacatttggcagtaaggagtcaatggaagctctaaagcagtaggctatttttgaaagtgagtgttttcactaagctttgactatttagattgttgcttagaaacaagcttaatttatagttttcagtttaatatcatttttagtggaatgttttaaatttagtttgtgatcctcattcttagctgtttaaatcctgaaagcatcccaagtttaaggctgggtaacagctacattattcaataggatcatattaatagtctttgccgtgaaccgtgccgggaaacctgggctattttcagtgccttagccaaatgtgatgacttttataggccatattgctgtttccactctgaaaataactcctaatggataaggcagtatggaaaacgaaatcttcatgctttttattgtcaccaaagaattttggaatgaaaggaaaatggagatctttttagagctatatttgggaagccaaccaacattcttgtcattctgagcttttctggagcagctaatagacaagaagtaggtataaaatttgttgtcatggtggcagtgacaaagaaaaacttggacaatgatttaaaatgcacgacagtgatgttaaacaaattaacagctgaacttgaaatttttgttttccaggtgacagtattgaatgtaaatgcactgaaaagaactttcgtagccaattgcgctaagcgtttttttaaactaaattatagttacgtggcagctatagaatgttgaaagtgttgcagcttaatttttaaataggaaataacgtagatttaacacacattactgaacacttactgagatacaggcatcatgagtatgatctttgctaccctaaagtaatacattccagtgatagaaactgacatacgccaaggaatcaaattggggatgatggtgtcatgagaggcaaaaatgattttgcattagaagtttggagaggaacagtcatagagagggtccctagtggatggatctagaaacttccatagaaggatgacatttgaagtagtccttgagactgaaggaggatttggaccggcactgcaagaaggagtgtgcaaatgtggtcatatcctagggagccatatgcgaagggttttcagtgatgagcatagaggttcccattctggtctcagctatatggttcagaaaaatagcttggaagttgaggaaattgactggaatatttttccaaagatgagaatataactgttttcagtgtcctgcttttcactcttttttttttcttcttaaataataggttgtagatttctgtttgccccagtttttgaactttattattattgtcgttgctgtcattgttattgtatttctcacagcagcaattttgtttagagaacatttgtcctctcagtgattgaatccatgcctgggctagattaccagttggttctatccttgtgtgtttctcataactttatgaggtgagaaaatgtttcacagccttggtacttagacatttacaaatatctgctgttgatcatgtggacaggaaggctgtggctgggagaaagcagcctcctcctccgaggagagttgtgtgaagtttgtaaaagaaagcaaaggtggttagcacaatgccaggcacatggtaagtgttccacaaatatttactgaatgaagaaaatgaaaagaagctcaccaagaagctgtgtcataaaatttaatgttgattggctaattagaaaactcactttgtgtgttaccagctatcttatagtgaaattattggcctgtgacttgtaataattaatgttatagatattatagatcttgatccaaaaagataaccctaattcttttaaaattttcatcttaatactgccgctttccaagctgcttttctcaatgacttcttagattctttgcaggggttttttaaaagtttaatttccaacactattagttttctctttagattctcgcttttcaaaatgatgattgaggctgcacctctaccatcctgcatccttccaataataagagtcaaggccacatcacccattggggtgtggaggagaggatgattgatagggggttaagagaaatgtggggaagtttggaaacaggaaaggggaataaaaggaaagaatgggcaggaaaaaaggagtttaggcaaggctttagaatagtctgcaatttcacagaaatgtgggactggaatttcaactttgaatgtgcctaggaaggatggagcagtatcccccaacttcatttactttgctacccaggcctgtctgagtattgctttagaaggatactttatttgaacatactcgattacattattctctgttggtgctcctttgcaaagcttatgtaacatggaaaaagatttgtcttttctgttggtagttaggtaaggaatcagaggacaggtacgagagacgatgatgatgacatcgatattgaaagatttttaaaattttaatgttttaaataacttacacaaataatgagatcatattattaatgccgtgtacagcatgatgccttccatatagaaatcctgattttagagtagggggagatactctctttaaataaattgttagtaaccaactaatacattggggatcagtttaaaaggttatagtaaatgtagagtagtcgaggtaacattgctgtgtagagtgagtacttgtttgcagatgatttggttttgacatttttatatttcattgaaaagacaagatggttccaaaggcctgcgtcttcatctggcccagccttttcatttgaaaatcagcgtgcagatatttgccacctacagataatcaagactattctttaatgcattgtaagcttcttaaaggatggttattacatttgaatgtctgcttgcctgtggagctgatccatgtcccatgtcgggctgatgtcacatcgaaaaactgagttagggtgaaaatagatgtttgttttatttgagatgtagtcctttttttccctaaggaggaaatagagactgcggggagatctgaaaggaggaaaagggaggtagctgagcttaattatcagaggctgtcacccctgagccacttttctgccattctttccagctttctcagctaaaattagttacatccattaccaggtttccttcctgacattgtttccttgtcagtattacctcctttcaatacactgagtttcttgtcttgcatcaaagaccccagacagtgtggttgatttgaggtgcatgaccttggagagctgacaccaaatagatctcatgttctcgtactatatgttgttttaaagtggaacatcaagcagcttccctagtttaggttactctaaatgatttttgaaacactgagagaatcatctaatacagttacttagttccccctagagtgggctgaaacattgtatcttagtaagatggatgtacctgagacatcctttgcacactttctgttttcatactgtgtgcagtagacattttatacccaaagtgtatatggtggggtgggggcagggggagcatgttggataaaataagtgaagaagtaatgttcttactgtcctgacacatctagtaggagtgagaaaatagagttaatagagataataagtttactatgaggaaatgcacaaggccggacatgattaactgccaagtgaagtaatagagcagattttaagactgaatggcgagaacaagagatttctggagtctggaaagacattcaaaagtgggtttgagctatgtgctgaagaaagatagtacccagatgaatcagaggagaatggaggattaggaagagcagcatcagaggtatgcaaccccatcacaaaaattctttcctccttgtagagagagaaatcgggaagataatctcaaggcaagaagtaacttcagagatttgaaaatactttgagatcttgagaagtatgtacttttcttcatgaaaacccttacaattagctgaattcttaatatagtgcatgttcttatgtacctagagaggtgaatttaatattttgcatgtcagtgatacagcctttgcattgtgatggtgaactttcaagttgatttcattgcttttcctttttgatagcccttattcatccccaaagcataaatcttgcttacatagaaagttctaaatgcattattattggcatgcactattaaactgggaggaaaatacatttctctaacttctgagcaaagaggcaaaatcagttttcctcaagtacctcacaaacgcttttaggctcaggaaatgacctaaatgaatttcctcagtccagtaatccagttaccctgatggtacatgaaatcaggacatttaggggatgggggagatttaagagatcacttactccagcatccttatttttactgatggaaaacctgagattcaaacagatgaaatgatttgccctactttgctgattcttccctagccacattgctcatcaccccaccttccagtctgcctgctttctcctgtgtaaagcttactgatggaaaataggcacaacctgctggattttaaattggaagagaggctcttggtgttggtgggaagagccagagaaagtgcctgagtttgtgtttggtcaccaacatatcccccagcagccctgataggacggatgtgtttgaggaaagatctgaggggtgtctctgccattgtggctcataatgtctcctgaaggcattctgataatcaatcactgttggttggttccactaattctaaaagggtatgggtaagacttttctgttaatatttagctgtatctattgaattccccacataaacctagtgttttagatttggggagggggaaacttggtattggcctgtgttcaattctggaaatttaagatgagtttactcagccagggtctgttttgtctattctgtctctttctctctttctcagcctgtatgagaaaaaatcctgaagaatgccctccccacgcttgcgccaagtaattcagagctgttcaaaactacagtgttgaacagttgagtttgggattatttctccttttccatttatacataatatactatatatatgtatatattatatatataattatataagtatactttttaattttaaataaattatatataataaattgtaatatacaatagattaacatacaataaattaatatatatgacttgtatcctaaacaagacatactttgatgaccagattctggattagttgaagctgccatgccagatttttaaaactaggtgttaagcactttttctggaatgcttttcctggcaaatgtaacaggcagaagagtggcctgtggaattgaaatctgtttttctattttttcttttctttttttttttttttttttggagatggagtcttgttctgtcaccaggctggagtggcacgatctctgctcactgcaacctctgcctcctgggttcaagcaattctcccacctacagcctccatagtagctgggactacaggtgcatgccaccatgcctggctaattttttttcttttttttttttgtattttagtagagacggggtttcaccatgttgcccaggctggtcttgaactcctgagctcaggcaatctgccggccttggcctcccaaagtgctaggattacaggcgtgagccaccgtgcctggcacaggtctggttttactttgtttttagtttcttttcatcactaaaaaatagctggatttttcttttttaattgggaaaagcaagttcaatagtaaactttagtctgcgaacatgtctgctgtgatttttttctggggggcgttggggatttgggggtcatgttttcatggtgccctgatagagaccttaatttttttgtgtgagtggcagcatttgaatctgtcctgtcttctatccaatttgaaaattagattatcaaggcaatcttttataaacattatatgacttaaaatagttcgtttggctcttaaaccaagaaactttaatattttttctatatctaagtacttttgtaccatatgcatctaagattaatgccacttcatatatatatgaatatatatgaatatatattgaatgaatatatatgaatatatattgaatgaatatatatgaatatatattgaatgaatatatatgaatatatattgaatgaatatatatgaatatatattgaatgaatatatatgaatatagaatgaatatatatgaatatatattgaatgaatatatatgaatatagaatgaatatatatgaatatatattgaatgaatatatatgaatatatattgaatgaatatatatgaatatatgtatatatgaatatatatgaatatatgaatatatatgaatatatataaatatatgaatatatattcatacatctagatatatgaatatatatattctaacaaaaatgtagtttttgttagaatttttgcttctggggttatttttctaaaaatgctaaagtgctttatatttataaaatacttggagtcttaagatctccagcatcttttcatgcacagtactttttttaaccctgttttgccagaatagaattggaaataaaagttgttgacaatttgaaaatattattattatatttgtactatggaaggccaggaattagtagagaaattttactatgactagtagtggagaagtgggggtggagtcatagagggaagagagacaagcagacagatgcactgtatgtttcaaacagtacatcacttcatatgttgtgatgggagacagatttatttttaacattctgtgtgacataatctatggtttagcaagaatgcttgtaccaatattttttattttaatgaatttccctctttattgatggtaatacatagaaaaacagaagttttagctgtaggtcacatgtgttgctgctactgatggaagcagggcaggctctcctgactctaatatgaatcaggatcttggcaatgtctttcataatttattagtttttaaaatggagcactttgcttataaagctttggagaaacaagacaataaaatatacaattaattaaaatctttagagcaaccagcagcatcattaataaagcattacactctaaagcacataagaattgcagcttactctcccatctcagtgggaaaaaccaggataaaagagcctgtctttcatcatagtgaataaactgagtttattggacttgggctggtagattttcaaagaaataggctcctggccaataccccattcctctctacatgaaacatctgggttaataataacaatcgcctgccttcatttggcacttacttcattgatatgttcttgtttaatcctcacaagaatgcagggtagacgttaggaattccattatacagatgagaaaacagaggatggcatgagttacagaagtgctcctcaccatgtagtccgtggaccagcaacatcagcaggagcttgttagaagggcagattcacagccccacctcggactcactgaatcacaatttccaggggtggagccccgtggcttgttttttcacaaggtcttcaggtgattcttatgcatgccaatgtttgagaacaattagtttataagaccttatggacactactgtgtagtaggagcagaaactgagacttggtacattggattttactgttcatagggagcatctgcaagaaatctctgaaggatggattcttcagaactatacatgatttatgcttgctatagattttccttttctctttatccttagcgcttgcctttccaaataacttctctgtctagtgtatatgcaaaaagaaataattttaagagagagatccttttaaaacctttcttgagagaaccccctagctctagtctctttcccctttgtaccgtcatatctctttccagaagattattttgaaacttaaatgtgaccattctggtcatgcctgtttgaaagcctctgaaatcatttattgtctttgctatgtatacttttgtgtcttcacagaaatagaccagtgttcatgttggctgactgacaggatggtaccatttttatctcatctcaaagagcttattctagaatgttggtgccatgccggtaaagtgtgaagataaatcatggcatttgatcatatatcctgattttaccatttactggttagttgcatgatctgcatatatcatctgacttttctgagtttctattttaaaaatggaggtggcaatatggtgtaaattagagtcaattctttgagaatactttggaagccattgggtgctatgcaagtgtgaagtaatgttctggcatgttttgaacaatggcttctgagggcgagtctacagagagatttggggataaatgttgtgttactcttccctgtgatggtgactgagcttgtcaaatgagtttgtgtacagaagggaggagcagagtgtgcctggtggaaggatctcagcctttggactcacccaggctgactgtgaacttgctctcagctttatctctaaaacgaatgccagagaacctacttgtaaaagttgctatgaggaaggttggagtggaagacaaaagaatcgagagtcaatggtatattcatgggatttaaagccatgagaggttggatgcagtcactcagggaagaaatctacaagagaagacaaaagggctggaagaaccttgtgtgagaaattatgaaccaccacaccgcccccccaccccaccccacacctagggctctggtgctgactttgtactgtagctgggtccctggaaggctcacttactccagcctcagctccctcccaggcctgccaagaagctacagaggcattcataagaagtcactttgataaccaaacagcaggggttccaaacccacctgactatggcagcccagatgaccacacatggatggcagtcctggcttcttaaaagtgcgtgtgcctgtactgtgtatgtgtgtgtgtgtgtgtgtatgtgctggtgagggagggttggcaacatgaggaatgtgttccttctaaaggggcagctacttcctggctcggtggattattgccctgaggaaatatgaatctggagttacccagtcatctgacatttaaagacaagccagggatctggattttttggtgacatcttcagattttttttaatgttggctaaatgaaaaacaacaacaacgacaaacccactttgtgacccgagtaacacacatctgtgggccagatttggctgccagctggtggcctctgctgcagagtgtataagcatgacctattattattggatgttctggaatttataataacctcccaggaacctttatgctggggcccttctaggaatacatccatgctttctttgcttctcttgaaactcccccactcccccaagatgtaccagacctgttttgcctcagactccagggactttaaatttgtgctatgtaatttggagagattttgagtctgggtgtgcaggcaggctgggcaactatagctccttggagaggagagttgagagattggcgttatagtttttacctctcctcctagaaggtcaaggcgtaaattgtctgctgcaaatagtaccccggtgcctgctggatctgccgagccactgggataaaactgattcattgcatacccttaggatgtgtgtgtcttccttaggaaaagatttttcatggccttatttttttatgtgttacagaaaaaagagtttgatgtggatactctcagtaaatccgagctgcggatgctcctcagcgtgatggaaggggagctggaggccagagaccttgtcatcgaggccctgcgggtaaggacgacacaggagtgggtctccatgctggatcatttgcttttttcaaagagccattggcaaaccttctttttcttaatttttgaatcaaatagatttaaaatgttacatcaggtcaaaatgtgctcttcaccccaaacactaacccataacttttataagcccaaacaaacactgaagtcagatggtcattgaaatgctgggggccgagacgaaactgtttagtacgggaaacttgaggagtcagctgtactcgttcagaaatccttttatgtttcacatgtttatttggttagaaacgtgttttcagaaaattgctaatttggtatcctacatgtatgtgagggcagtgaggaaaagttgaggtttataaaaaatattgctggtaatagatatttttcttcctataaaaattgttatttttttatttttagaaactcatgcattaaaaagtaaatgtttatccataccttcaaagtgttaattttttctggtctttcagtaattttgaaatatttctgtaattgcttacaaagaatatattacttaaatgtctcaataaaattttctttttgaaaaaacaatggtgaatcccagcactttgggaggccgaggtgggcggatcatgaggtcaggagattgagaccatcctggctaacacggtgaaaccccttctctactaaaaaatacaaaaaattagccgggcatggtggcgggcgcgtgtagtcccagctattcgggaggctgaggcaggagaatggcgtgaactcgggaggtggagcttgcggtgagtcgagatcacgccactgcactccagcctgggcgacagagcaagactccatctcaaaaaaaaaagaaaaaagaaaagaaaaaacaatacatcaagaaagtctaatcaccaattttccaattaagtattctggatcttgcgtttattttggtttgtagatcaaacataatttggtgcttgtttttttccttcttttctatttaatactttgtctgtaattagttattttttggttcttggtcatttggccaagaaggatatatttattaagtatgggtttatcttatttcatcagggaattgtttcctcaaaccttgtcttaggaagtctaatttaatgtacatatgaaaatctgtggaatgttaacacattgttacctgtgacaggagcgtatatggtagaggagggaggtggtagtgctggatggtcagacataataatggagagggtggacatggggagaactcagttgtgtgggaagaagagatagttcctgaagtcatgtcttcaatgtattttcataaaccagaagttggcatagcagatgtagtgattatccatcaatttgattgcagaaacaaattgccacagaaaaatggtagtatagttaagtatagtggccgatactgagttgaaggtgttgccttttgaatgacaagttctgctcagtagacatttgcagtttgcttatattcatcctattccacattgagaacatctgtattgctggcaaatgtaaattttcctgaatgaaatttttgggagaaatgctgaggcagcatgtaactaacatatgtgacccttagcccaaggacagaacaagggcacagtcagctgcgaaggccagtagtatagcctcttgtggtgagatagaagtgaagggctccagctgtgccttagatatatatatatattttttggtccttctgtgttaacttgtgaaaggcatcagcactgtggaattccccactactcacatcaatgtttgaacatttagtgaagtctgtgtttttatgtatcaccttagcaaccacatgtatttctctttttaatttaattgcaatactttgaaatgttgaaatgtgagagtagacgtaaaggcttgctaataatcagcacttgccgaatgaacatttttcatagagtcaaggaatgttagaattacagggagccttagatgatattgtaggtcagtgttttgcatccctgtcagatgtggtgtctccttttcataaaatatgttatcaccttcttactatcctgcaatgaaatttatggagaattgcatgtataagtaggttctgttaaaaattacaaaaccaatacaaagataccaggaaaatatttaaaataaaatatgatgtactcaatatataaatgctcagacatgactgtactgaaagacgtgataaaacacgtgtctatttgaacctattcatggcattgacatgaatataatagttgcaaaagaatcctgatcccatcctgctatgttgtttactctgagtcagcagatttgtggtgggtgaggtgattttctgaaatggtgaatgacttagtaaagttgcaagcaaaagtacgcacatacacaggagttgaatccctggaaaattcagtttgttaaaaattatattgacttgtttaataagtaaaaaggagttaccctctagactggtcatatagaaggttccagtgaaaggaatgaacagagagatatttgaaacatggcacagttcctggatatgtggaaaggaaccacatcttttctctgcctccctaagtgccaatcactgtgaaaaccaaaaatgctcatctgtttccaaaacacatcctagggtactgctcctgtggagaaccactggccaagaccagtttcctttttttatagataaaatcaaacaaaaagcctggagacttctgacttattgaaggccacagatatggcatgcataagagcttccagttcattttcacacagcctgccctgtggaactcggtgtatatggaggctctttgttttgttttgttttttgttttcttttttttgagacggagtctcactctgtcgcccaggctggagtgcagtggtgcgatctcggctcactgcaagccccacctcccgggttcacgccattcttctgcctcagccactcaagtagctgggactacaggtgcctgccaccatgcccggctaattttttgtatttttagtagagacagggtttcactgtgttagccaggatggttttgatctcctgacctcgtgatctgcccgccttggccttccaaagtgctgggattacaggcgtgagccaccgcgcccgacctatggagattcctgaagcttttttggtttaaaattgagaattgtgatttctttatttagatgattgtgttttttacagtaggtaataatgtcgtcttcacatacctgtggtagccatcatagtatcactgtggtgatttactgattgagtgttccctgggatattcactggtcacagtatgtcatctgtttgccttttcctataggggtggaatgtaactgagtgactaatgccccagaaagaaattgggaaggagagaggctgtgaaactgtcattttaattttgttttacattatgagatcaatttactcctaaatcaagaatcaaaatttcctcaatcggtaatcagtgtgctgctattcaactgtgaaggaagtgcatcttggttttttttttcagccaaaattaatattcctctgaaaatagtaaatagttttgaacttaatatataaattataaagttacctaatttgtacactgaactttattaaatttagaaatgattttgttgtgagacaaattctttagaattttaaaatctttaaacatatatttcagatgaagctattttactttaaatcatgctatctttaagctttgatttcaagttattaaaaattgcatacatcattgaattaattgcaatggacttttcaaagcaatccataaatataattttggatggggaggatgttaagagattgcaatatatatcttggtacctttgctattttcatatatttaaggtatagatacttcctagtataaaaagcccatgatagtattgaagacattaattttttaaaagagcaatattgatggaaaaatctgaattgcataaagctgattaactgaaatgtattttaattgattctcatgggaattatttagtttgtcaacaattcctccatattcacatagagtaggaataaatctttgaacaaacagataacattcagataaagtccaaagaaaaatattttgcagttcaataaagaatgtgcccaaagagaagcagctgcattttctgaacaccaagataggcacagaagcttttgaattaaatttaattggctattcaaaatctgcgtacacaatttatacagaaatccgtgattcaagattaattaactttgtggagtcttctggcctttgtttcttttttcctgttgctactggtattcttacaggtatcttagtcaaagagagacaaagtcaagacgatgaaaatgctataatcataaaattttaaaagtcaaaattatgtgcttaagcctacattttacagtgcccagcctgccatcattagcatgagtttacataaatattatatcatttaaacaatgaattcctttggcaattatcttcagattttttctgtgcctttttccttttagattggataaatgagattgaccataaacccatggcaattcttcctcctaaccttcatataaagtaactatataatctagactttaaattattatttgcattgaaacttttaaaaattagccagtttaacatttcttcagatagaatgcatttatgaccccaataacataggaaactatcagttatagaattgccttgtacaagtggctgtaagaaagagactcaacataaatagattaaataagttcatttctctcacataacaatctggaggtgagtgatcccagctggagaggcagctccatgctaagtggtcattcaacaacccatgttatttttgttttactactcttcttagggagttagcctcatcagcatgcttaaaacaggatcagtgccagctccacatcccaacatatggtaagggggaaagatgggaaatggagggcaagcatttcctctaagtatggtctttcttctgcagagtgcacacaggtgtatcggtgagacctttcatagacatggaacttttcctagttgcataggagcctggaaaatggccatggctggctgtagtactatggaagaagggaggacttggggcaacattaacaacctgctgaagtccaagagggagggaccctatcttgatttcaatattatctttcaaaatatcctgggctaagatataggaagatagatctttccctccttccttcctcaataaggatttgatgaatacctattatgtagcaggcataaaaataacgtttgaagtacatgtaagtgaagatgtattatgccaaaattgtatctgtttagaaaattctgtttcttggctttatatatttaaaattaattgttctgtatagtgccatctaggcctaagttttacttttctcagaccgtgactcagtatgttgagtttgcctagaatgatcttccttttcaaaaacttgactgttcattgggttcaaaattaaaaataaaatgtaaagctcttaagtaattttgctttaaagcaggttttctcaacctcagcactgttgatatttgggaccatttattttttgctgtttggggggagctgtcctgcacatgtaagatatttagcagcatccttggtctctacccactagatgccagtagcaactctttggttgtgacaacaagaaggtctctccatgggggaccaaattgctgctgcttgggaaatgctgttttaaggaggtaatactagtcaaggagggactatttttaaaactgattttgctaaaattggccaggcgtggcagctcacacctgtgatcccagcactttggtaggccgaggcgggcagatcacttgaggtcaggcgttcaagaccagcctggccaatgtggtggaactctgtctctactaaaaatacaaaaattagccaggcatggtggcaggcaaatttgggatgaggtccctctatttatggctattaatgcaaacagtccgcatgaggtaatagcttgttgacccccatcctctctatagaactgagcccaaccacttgcaacagcgagcccttgccttgggacaggcagatttaatttgccagtgattataagatatatctcaggctgggcttggtggctcatgcctgcaatcccagcactttggggagctgaagcaggtggatcacttgaggtcaggagttcgagaccagcctggccaacatggtgaaaccctatctctactaaaagtacaaaaattagccaggtgcagtggcacacacctgtaatcccagctacttgagaggttgaggcaggagaatcgcctgaacccgggaggcggaggttgcagtgaaccaagatcaagccactgcactccagcctgggtgatagagcgagactctgtctcaaaaaataaataaataaattaattaattaattaaatcatctatttttgctaaaataaatgtaaaaactattcaaatacgttgcataatgatgcagtgattttcttgaaaaagtatacctttaaactaaaagtaattattctgaaaatgcccattttaacaacttcagggccctttcaaaatgtattacatattttactatttaaaattgaattacagtttcttatgcagaaattaaatgccttatttttcaaattaaaaagcctttatggttgtatggttcagtgctagaatcttgacatagaacaaaggcaatcactttaaatagaataatggttccactctagttttaaaagcagccgcagagtatgctacagagtattgtgaatgttttcctcatatgacatgtctgctaaatcctgataaaagaataacaatctggctttttattggtttcagctaagtaaaacatgcagtcttttgtatttcagaattctcctgtgaatgcaggcatttgattgaccaaaacataccctttttgtgctgttcattataattaatgaatgaattaatttgctgagcagagctgaatttatgaaaacaaaaattaatttaagtttcctttcctgtctgttgagataatgcttttgtgccatgctagagaaaggaagaagggtgttgaccagattttgtgttgtttctgcaagcaaatcagttttcagaaagaacaaatagctgatgatttttaagtagcattgtatttgttccagcaggacaaacactgaaataatcaactttgattcttctggtcaatgttttctttgataaacatttaccattagtaaaaaacaaacaaaaaatagaataccatgcaaaacattgcttttccatatattagaaaatgcaggtgatgaggtcatgaaagcaaaatgtttatgatcaccatttctggcccatataataagcaaatgaagtaactgcatagcatttgcctgctgattattaataagttaccaagatatatgtaaggagaacacactaaagatgaggcttttcgcagctcaatctcccacataccatttgatccgttctggtgcaggatagaatcagggttacaaatagaatgaaaccaggaatatatttttgtatactatgaagatgatcacaattatggggactgtcagtctaattaacagttcatttttagaattccatgtgatctgaaaatacaaggtattcctttgaggcattctgattacattttagccagctcatgggtggctaagctacaagtcatgggtttttgcagaaatttcttttgccacctttatgaggaattctatgttttgattataagaggaaacaagggtctaatgcagtgtgctcatatacagtgtgcagcatcatctttattatgtaaatttttaaattttttgtggcattattttcaactttgcataagtaattctgtttgcagccacctctgttcacaaccagctaaaagtaaactaaaaaatgaaaaaggaagagggtggttttatcattttaaactaaaacagtttcttttctacagccacctccatccatcccatgatggtgggttaggcattaagcaaaccaaagtcaagaaaagggtaattccatttggctcatgctttgcaggaatcctgaggttaactgctatttacaacaagctagagattgaacaggggatggagatgaagcttaatattgttaggttttcgttatatgtccggcacttcataggcattatttcttatccctatgaaatctcttgagatcagtggtagtacccctactttaggaacagagaaagtaaagctaataggatatatgccattttctgtctgactcctaaccttagccctcaccatgtctctcccccaaaggcaacattaatgaaactaagcattttcctagagctgaaagttgtcatttatggattgtttactttactttaattgctacgagggctcagaccatttctacacacctgtaatcaattgtaaatttcaaaagctgcatagaaattgaagctacaaagaaattgttagtattctatgtttaatcattcatttgctgttcccttgcaattgagcgcaggtaattataaacagaagtaaagccttgaagatttttaagatcctattgaatggcaagtataataaggtagaggaacatcattgatttttaacgtgtccttcttattaattataccaaaagcttgtgcttttctgtaattagggtatgattctaataggatgagagagaacatgctggtgcacttgagaatgctgcataacctgagtttagggaagtgatggagatttctgaaatacacaaggacacaattactaaggaactgctctttccaccctgaccatctttgcatattttagtcattaagtctgtctcttgtagttgcattttgtttttaaatttgtaaatcttttagtttttcatatttgatcttttttttttttttggttttgtatatgcaaaacatcagcaggtagtaaattcagtccttaaatagaaatttggtttggtttccatgaaaggctgttgtatggatttccttgatgttataaaattctttattttttccaatcaataaaagttgaagtgaatttgcgagggtagattatgtaagccagggtcatgatagaggcactaccaaggaagagttcagtattttaagtaattgatgtattaaaatgcggatgtgtcattggccttgttagaaagttcaggtttcctttcatgaagcctgaatcaacagaatctagttttagattagactttttaagacaaacttttaagtaatcctgtcaagttaacttagagttgatgattttctattgatgagtctctttccgtgagtgcctgggaatacatttttcataaaaaagtctcaaaagtgtattgggcttccttctggagtttcttgacaaaataatgagacttgactggcataactgagaagcaaccttccatcatgtctgcttggctacatcagaggttccatgtgtttttgtgcctgtatgggaatagtaacaagttgtgagtttggtttggtggactgtagataggacaactaatggaagagcttcagaaagtcttaatagatactgtgaatatgttaaactcttaataagtttagatttcagacagttgacaattaagattcactgtaggctccgaggtaggaaacagatgtggtaaaaacagtgtctaagggagattacgttaaccacttttggaaatagattgacagtaaaagggaaagaaagaatctgaggaagcagttacagttgatgttaattaaagtatggttccatgaagctctgaattctgggtgatggctctaaatgtaatttgttgtgtgtgtgtgagggggttggtggggaggtattaacaggacttgaatagacagaagagattgggaataaaagtatctcctccagcatgagtgcattattttcctttatttcctctcttctttttctttttttccctctattttcttttctttttttcttaaatagagacagggtcttgctatgttgctcaacctggactcaaactcctgggctcaagagctcctcttacctcagcctcccaagtaactgggactgcaggtgtgtaccaccatgctaagcttaagagtgcattattttctaactggtgacagcaaatagttgctcctaatgcaatttctgtgtcagggtagaaactttgttttttaaggacattgtgtttatactccatgtgaattcatgctcaattaattcaggcatttgttctagttcttccaacagcctttttagtgcttagctgttcaacgttcacctagtaaatattttctcagtgtatatttatcatatcaggtgttgcactgggaagagagtgtaagctaaatagtcctggtacttctaaaatttattgtctagtaaagaacactaaccataataagttgcatttgtgataagtgtgacaatggaaaagtactgggctgttaagattatgtaccatgactgatatggtatttttcttagacccactgtggagggctgtgtaataatagggccaaagtaagaatacaaaatatttgcaaaatattaatatttataatatatctaataaaataaaaataaccatgtttctcttgtttggtccccacctacttaggtttccctggattttgtgcaactccctcaaagttgttttattttgtgcaactgctttgccgtgtctccttttgatctctccttgtatgcagatgatggcctcatgaatttcttgcttttcaaagtgactgttagtctctcctatttatctgtcattctttggttacttgaaattacaaagcagtatggctgttttgtaccaatgaatatagaggtggtttgtttgttttgttttaagaaggggtctctgtcaaccaggctggagtgcaatggcacgaccatagcacactgcagccttgaaccaaaccatatacataggtcccatctgtggtttcaggcatgcacttagagtcttggcacatattccccatagataaggggaggctattgtatattctactaatcaagcagtcacatagctcagattcaaggtgaagagacataaacctgacaggggagaaatgttgaagaattggaggatgttccaaaacctccaggtaatacctgcctttgtttgctgagccctaactgctaggcatgctatttagtattttatgtggattatgtcatttaaccttcatgagtatccctggaagtaggtactgttgttatctcattttaaggctcatggttaaggaaagtgttctgtgtcacacagctaagtgccaagccaaagtttggacccaggtctttctatctccaaatgcatcttcttaactactcttctatataatcttgtggaagagagctaggtaatagctactaattagaatgcagggctggcttgcgtgttttagtaaagcccagagaaaagagttctaatgaagatgaattatggacggcttctgggaagaggtggcattcttgtagtcttttaaagaatgagtaccttaatgaatagaacaatgagaagtgtgttctgatcagaaagagccagagcacgggatctgtgtgtgctctgggcagagtgaggaggtaatggatgaaggcacaggggtatggactgatggagtaggagttcctatgggctctatccaggaggttttgaatgccaagctgaagcatttatgtgcttagcctggtaggcagtgcagagtccctgaagattatcaagcaggaaaatggaatgatctgaggcttttgttctccaagtgtggtttccatacctgcagcatcagcttcatctcattaaaaatgcgaattcttagaatccctaccctagatcaactaactcagaaactctggggataaagcaaagtgttccattccgtgtttccacaagtcctctgggtgattctgatgcatgctaaagtttgagaaccgctgatccaaaggacggtcactcataaagctggtgtatttgtgtaacatcacatcgggtttgcggtgaaatcgctgatgctgattaggtgtcagggttggaaaggctttctgctcagtaagcaagacggccagtaaatttgtctagtctttttcttttgcccatctacttgatgagaaaaagaggcagtggctcttctcaggacagctttttcaaaagtcagcaagtgcctcaaagtgactcagcctggaaactttcttaaagaagcctgtggaaatagcactaaaggagctttcttgaattgttggattaaaataaaacatgaattattaagacattaagaactgtatgcaatcgactgattgctattacagttgatataattattcacgtacacctctaatggtttcacataggaattgaagtggtttacaggaataaaaacagcaaaatgggaaaatgtaagtctataaaaattagggaatagaacagtagtttacaaaccttttaataataagaccttttcttccaatgaaatcttacttgagtcccagtacataaaccagaagctgagctcttgggttggagcaaatgattagagtcctaagtttcctgaatcaattaaaacggaaaataaaataggagcagcttgagttacacatgatgtgttgttgtttataaggtagaaaaaagctgtagcaattacttcctcagggaagagaaacttttcctgatactgggctctataaagtttttcatctctgcctcttcaaattggagatattgggtagtgtggtcatgttttccacaatatcactgtaaaactgtaatggctgagtataaatgggtgcttttgcataaaattcattgatataagtgagaggcaggatgcttgggcaaagtagctggggtggaagtgatcaggtggggtggtgaggcgtgggcaagacagtgggatttcgagagggatgggcaccacagcagagtggtctgctgtgaactgaatctgcagcagatcatctcaggaagcagatggggctgtgtgaccttcaaaccatttgccagcttgatctcataacatttgctaatgttccttatttaatcattttatgtacatgttttctagactgaacaagtattcaaatatggttaggcaggccaggcgtggtggctcacacctgtaatcccagcactttgggaggccgaggtgggtggatcacgagatcaagagatctagaccatcctggccaacatggtgaaaccctgtttctactaaaaatacaaagattagctgggcgtggcagcacatgcttgtaatcccagctagtcgggaggctgaggcaggagaatcacttgaacctgggaggcggagattgctgtgagccaagattacaccactgccctccggcaagactctgtctcaaaaaaaaaaaaaaaaaaaaaaaaaaaaaaaggttaggcaaagaagatctataaaaatttggacatggaacaaaagcatggaaaacatatcagtgcttctacaataaaatgagggttgatgtcaaataattttggcttatgacactgtcagaatgtatgatgactgctcataacacaaattatgttatgaatttatgaatatactttatagtttaagtactggtagttgacagtgaacaatatttttctatagccctgaaataatttggctagttattttctctaatcaacttatttcagtttagaacattctttttctttggagtcttgctctgttgcccaggctggagtgcagtggcatgatcttagctcactgcaacatctgcctcctgatttaagcaattctcctgcctcagcctcccaggtagctgggattataggcatgtacctccacgcccagctaagttttctatttttagtagagacagggtttcaccatattgcccaggctggtcttgaactcctggcctcaagtgatctgccagcctcagcttcttaaagtgctgggattacaggcgtgagctaccacacccggcctagttttctgcatttctgcttttgaactttccaactctctttattgtcctacttttcattgctttgaaaaccagcttgtgcatttttttttttctggatgcccctgaaatgatttaaaatgttagaagcattttggtaaccctgtaatctaaaattttgttatttagctcctcttcctgttggtgagttgaatattgacttttgcagggcatcattgctctttctgtggtgtctcttaacagtctcaaattgtctctaagtcaatttgtctttacgttgtaactaaccaagtgtaactcctggtaaacattcactaccattttttcttcataacaagttaagctgcccctttaatatgagagtatatatatatttttttagttacaagaaaacattaaattatataaatatttgcttaaggaaaaaagtcacaatgtttaagaagccagtttttaaatcttgatacatttaactaaggaatgaagatggttagatcgtaataataatggagcaacttttaacatttttgttagtaattataattatgagagttgagtttataacagttttgtaaaatgtaacaatttgatttacaggcaattcaaatgtttcttcattaatccttttcttaacagtgtaaatagcattatatgatattttaaagtatatttctttttttttcttttttcttttggtacatgaacaatgactctgggtccatgtgggattagtctttctccatggattattttttctcactaataacagagttctaattctttatgtaccagaaagttatacttccttttcttaatggaaatatatatcatttgattgttaaattactgactttaagatttacccataaacctaccaccataacataattataaacgagttatacaacagttttatatttctcattttttttatcaagcattttaactatttttagtgtttctagtattaataaatcatagccttcttgactatacagtatttcacatggtcgaagaatcaaaaccttattattcttctatattctgtcatcagctgtttttccattagctatgagtagggatggcattcaaaatatttaacaggaccgggcgcggtggctcacgcctgtaatctcagcactttgggaggctgaggcgggcggatcacgaggtcaggagatcgagaccatcctggccagcactgtgaaaccctgtctctactaaaaatacaaaaaaattagccgggcgtggtggcaggcgcctgtagtcccacctactcgggaggctgaagcaggagaatggcttgaacccgggaagcggagcttgcagtgagccaagatctcgccactgcactccagcctgggcgacaaagcgagactccatctcaaaaaaaaaagaaaaaaaaattaacagaaaccacacaggtagcagtaaatcagaaaggatgcttaaaataccaggacagatcacattcgttacaccatcttgatgtgtactggctgaaccacagcccttgctgtggatatcctttggtaatgttttaattttgaaaaccctccatagagaagcacagcccagtcaaatgtatttgcttataaaaacctgtgtcatctcaatgagcattggtagtgcctgctagaatttagcgtagccagaagtgtgtaatttaggtaggtacaattttaaatgacataatctgcaagatattttaatagttgtgctatttaagatatccttttttttaattattaatgtaataaatgctcttcattgaatatcttcaaagacacaaaagaggaaattttcccatcactcagaagtaaccatttttctctgcattaatgaacacatataatacagatctctcaaaaatgggaacatgctctacacagtaatgtgtgcagcctgcttgcattcttaatatattgtgagtgaacatatccctagctattcttcaactttgagatttttcaatcactgcatgtcatttatttactgaaacctcagttcttggacatctccttactcctcttagaccccatgaactattgctgcaattcctcctttgcagatgcccccaattcccttggtcctcacttggtaaaaccctggtgccagtgaaattaaattctctgcctacctcatgcccacaccaataggcttgcacaagcctggagaaaaaaaacatccaaccttgctgactgccctcactttaaatttaccaagtcctcctgttggtcctttttgctgcttggcaattgtatggcatttctcaatgcttttactcacctgttctcctagattctttcaaactttcttcactcttctgagaccttcagtaccttcttgctttacttcactctcagctgctttcagtttcattgagaacattgaagcaatcagaaagagcttctggactctcccatcagcacatcaacccactcatgggcaccagtacccatgtgctcacttttcctcccctcgctctggcaaaccgtccatctctgaggcttgagtccagctggttattgtgcactcaagtctgtcccactcacatattcagatatcatcaagtttttcctcaaatccaccctgccttccctttagctgttgtgacattgtttccttttgccctattgcagcaaaagtccttagaatggttgcttgctagttgactgcaattcctttttgtccattctcccttgaacctactgtaatcagatttttgccaacaccgttctaaccaaaaatcactcatttttgtagttttcaggaaaaaaataatgttggacttgatttctccttttctcccataccctacatcctgtctctctgtacatcttgttggctctaggaataggatgtatcttaaatcttcctgcttcaccccatctccacttaccccaacctgtattagtttcctattgctgctataacaaattatcacaaacgtcctggcttagaaggaacacaaatttattatcttaacagttctggaggtcagaagtctaaaatgagtcatcaaggctgcatttcttctggaggttccatgggaggatccatttccttgtcttttctagcttctagagcctgtctgcattccttggcttatggtcccttcctccatcttcaaggccagcagggtagcatgttgtagtatctttccctcctgcagtgtctatctgtccctgtctctctctctcttcgtttctgcttctgttgtcatgcctctttctctgactccaaggttcctgactccctcttatgatgacccttgctgttacatttgaccagcccatatgggatagtcttcccatctcaagatatttaacttaatcacatcgcaacatcccttttgccatgtaagggaacatattcacaggtcccggagattaggatgtggacatctttgggggccattattctgcccactgcaaccctcttgtctgaattattttgataccttcctaactggtcctcccacttgtgtagctgccccactccggtttctgttttccatagtcatcgagttatcttgttaaaacaagatcgggatcatgtcacccttcagctcacagtcttccagtggccaccatcttgctcagagtaaaaagccaaggcctttctgtggcctcaaggctgcataatctacctctcttatgtttctgaattgcttcttagcatcattcctattcttctacagccctactggcccccttgcctgttccagccctagagctttcatatttgtttcctctgtctggaaagctctcctaaatggacctgtagctccttccctcactgttttagatgtttgctgaaatgtcatcttagtgaggctttctctgaccatctatttaaaatgggaactcctgtctacactacatgcaatctccatcctttcttgctttatttagctccactacatttatcaatatctgatatgtagtcatccctcagcatcagtggggattggtttcaggaccccctagaacactgaaatccacagatgcccaagtccctgatataaaatggtgtagtatttgcatgcagcctacacatatcctcccatatactttaaattttctctataatatttaagtcagtgtaagtgctctgtaaaaagttgttatactgtattgtttagggaataattacaagaagtttgtacgtgtttagtacagattacaaccattcttctctccccacccccaaatattttctatcctcagttgaatctgtgagtgtgaatccccagcccatgaatacagagggctgactatactatatctttttacatgtttattgtttgttttacttttcctactagaatgtaagctccatgagggcaggaattttattctgttcactgctctgtcatacctggctcaataagtatttgctgaatgaaagtatttagattgactccaaattttccttgttaaatatagatgcatctttatatcaaggagtttagattaatgaatattgtatagacacagaaataatttcttggttttgtcttttttgtgttatacagaaatacccattttttgattttaggtgaatacattttttctatctctattttcttcttccatagatgaaactggagccagtgaggaggacactttttacacattacctagttctgttgtttggttgactatatgtttctatggaccctggagtactttactttactttactgtgatggttctttttttctttttttttaatgcaagactattttgccggtcacagtggctcatgcctgtaatcccagcactttgggaggataaagtgggcagatcacctgaggtcagcagttcaagaccggcctggccaacatggtgaaaccccgtctctactaaaaatacaaaaaaattagccagatgtggtggcaggtgcctgtaatcccagctattcaggtggctgaggcaggagaattgcttgaacttgggaggcagagattgtagtgagccgggatcgcaccattgcactccagcctaggcaacaagagtgaaactctgttttaaaaaaaagactttttcggagcagttttagttttatagaaaaattgagtagaaagtagagagggttctcatgtgtccccctccaccagtttcctctattattaacctattttttaaccctatagtatgtacagtggttagtagttagtgtggtaccatgaagcctggaagagcttgtgagaaactggggttcaacccaggtgtccctttttccaagcgtctctcatgctctcccccaagccagggaactgctttttcttttgtctctaggttctagtgtgtttctagtaacatccctgctgtttgctgtcctgcttgtggattctgatggcaacttcctctggttgttactgttccattttttctcttttatattttgactttccattcttcttagtacctcatcatttttcagccatcatgaaaaagagaagtaatcttttatctgatgacaccagttagtagtggtctctgcctgtataatcatgcattcatcatgcctatttaattcccctgcactcctatgcatgcaatttctgatgaggagaagagatttgaccgaaaggtcatagctttctatctgagactaactatctttggagaggtatggggaagaccctttgggtcctgaggcaaccaccacattgggattcaatgtgtgggggatgttgtactttcattaactttctggcacatgtatatatagagagaggactcttcatcctctatagcaaagctgatacaaggctaaaatgttccaaatggcttagtgaaaggatggagatgaaagggaaaaaaaaaagacagaaagtagagtgtagtctttcaaggtatggtccaggattcaagatccccaagaccctaccaagtagtccatgagttcaaaacaattttcttaataatagtaaacattatttcttttttcactctcatatcccatatgtatacattggagctttccagaggctacaatgacagatgatttttttaacagctcagatgaagaagcagataccagactccagatgtcttctgtgaggccagatagtaaagaagtttgcagaactacaaaacaatgctattcttctcacttatttaggtttggaaaatatagtgcttttttcccataaatatgttgtttaagttaacacattaattgatttataattattttaaaattaatgcatttatttaaaatttctcagttttactttttaataagataactagcaatagctataacccacataaacaaaatctctatgtgtttttaataatttttaatagcattaaggggtcctgagactagaaagttggagagctgcttaatttgatttttgaagtacagctgtattgcactacccagacccattcttccttcagagtccatgctgggctatttcagtccctcatgagaggatgaacagtctctctacttgaagtttgccctcaccattcagattttctgctggagaacatagcttttcccagtgatactggaaataattgcctgcaggagagacccagacttcttcctgaagagataatagttatatgctttgcagccacagcaaactaactatatcacaaatgcgtatgtgctttacaataaggcacttgtgtggtaatggtttacatgtatggaaaggacattggaggaggcaggaaaagaatttttgttgttgttgttaagacagtgtctcaaactctgtcacccaggctggagtgcagtggcgcaaacatggctgaattgcagcctcaatctccttggctcaaatgatcctccccaggtggcctctccagtagctgggaccaggtacgccccactgcacctggctaatttagaatttttttttttttaagattctattatttgcctgaccccaacttgatgctagggatgctcacaggtatcagaaatatccccttacttttcaacttttttggacaggactattggttgttaccaagtgtcctgcttttccacaaaagatatttttctcccttctaggctatttctggaactagcaatgattcaaaagccgatggattcattaaaactgtgatgctcagttatggttttgtactttgtagccttcaaaaacctttaaaatataccctagatatttgtggattgtatgaacaggtgtgcatgtatgtatatgtatatatttgtgcatgcatacatataaacgtgtgtatgtatttattaatctatatatcccacataaatttggagtagtgaatctttcaaaatcaggaaaataatttcagtctttagatatttatgttaaccagacttggttatttggtagtttattattagtagggagagttatagtcataaaaagttttatagataaagcctactttaaaactattttagggaaattttggaggagtaaaggtggattatgccatggggccctgtagatgataataaagctaaagtagggaggtggtacaatgtgtgcagagttctgaaagctggtcaggaccacagcaggaagtagaactaaaactgggctctggtttcctgccactcttcagtctgaagtcagagatttgaccttgcttcttcctttgacagaagtagcacttttattaaattcaccatggggctgaaatgctcctaagaatcaattaacaaaaagtacctgtattaaaatgaatagtccactagcatattaaatctaacaatttgtcacattacaagtgtgttgaagttttctatttattatgatcccttagctatgactagaggattttgccaaattattagatgcattattaaggcaattctgtggttctgacacagggcttaggaactaaagtccagactgccattattggctgtgtgacgttaggaaatttcttcctgttccttaaatctcaatttaccactctgactaatggcatataaagagctatcttaacatgattgtcaggattcaatgagactacatatataaactcagatagttgtaggtaactcttgatgactgggtgcttatctgccagacaggtgaggagaacacactatgaaaataatcacgaactgtgatgaaattctgtactaagaaaattacaggcaggttcccactttaggtagggtggttggggaaggccttaacttgaatattaatgtttctaggaaaggaccataaacctatggaaattgcactttgggagatatttttaaagattttaaaaaaatcctttggaggattttttttaaaagccccccccccgcccccgcaatgttactatacattattcaacaaaaatgtggaaatcactttaaagaaatgaagaaattctaagtaataaaatggtactgtggtttccagctgcagctacatgaatgcatattattaaaaagattaataagaacaagcccaggaaactacagtaaatcctgaaatctttattttagtgcgggtttctttcagtattttatatgccactatttgtgttaacatttttgtaaaggcaaaatcaaaggtgatatatgacttgcccctcatagattaaaaaatggagattcgtctgtctccagtcttccaagctggatcatttgttaaatagctggtcagttgttaaaatgactgaattcatgtctattaattttttgaatatctgaggtagtttttacagattagtcctgtgattaatgcagagttactctgttaatgaatttttaaaatttttctttcctttttctttatagtaacaaatagtgtctaaagagaagaattggctgtagtctaagttatccccccaaacaaggtgtcacataaccacattagactccttgatgatattagcattagagaccatgctcatgttttgtgccatgccttctttataacaggccccattttatgagatcggaaattgaagctcagcagctgaaccctccacatggtcttagtagcagaaataccatctttgggctcagagtttagtttatttttcctggtgattgctaacaccaaagatgggctctgctacttggggagggttttatggtaagcattcaaatattcagtgctgcctagcagcttggtaggtggtacttatctctaggtgaagagtatctcatctcaggagattacatccttgaggctaatgtttcacttatctatggtcacataagaaactacaccaaccagttttgtggctttaacccatgagtgattaactctcagatctctgtctctggaggctgcctgggcttagctaggctagtgtaagggatagggtaataggtagtgaggccacaaatgcagatgggagccagatgttgaaggatactgcaggttacagtgtcaggtggatgtcacttttctggggtatctgggcggtcctttatagacaggtatgagtcgagcatccctaatctgaaattcaaagttctccaaaatccaaaactttttgagtaccaacatgatgccacaagtggaaaattttatacctggcctcatgggatggatcacagtcaaaacacaaaactttcatgcacgaaattattaaaaatatgatataaaattacctccaggctatgtgtataaggtgtatatgacacataagtgaatttcatatttagacttgggtctcatccctaagatatcttactgtgtacatgaaaatatttcaaaatctaaaaaatctgaaattcaaaataattctgggtccaagcattttgactatgggatcttcaacctgtagttggtattttctcaactaagagaggctggttagggcaaatgacagggaggaagagagagcagagaaggtagcaggggtatactgagagagaggcagaaatcagaaaaaaatatgcaaagaatgctgtcaaaattagtggtagtgagaaaagtagtaaaagtgtattaggctggtggatgttagcaagtgaacattttgttgttattggtggttttgttgttgttacaatagtctggcattcaatggcttaggggaatttttggttgcaagtgacagaatacctcctaagagatatattggctcatgtaactgaaaaattacaggactaagtctagcttttaggtttggctagaaataggggcttaaatgatgtcaatcagaactcagtctcacgctccttgtctctcaatcctgatttctttgggttaactctgctcaggcaaaacactgaccctggattctctgaaaagtacaacattggtagaattggatggtgatatggtttggctgtatccccacctaaatctcatcttgaattatagctcccataattcccacgtgttgtgggacagaccccgtgggagataactgaatcatgggggcggtttcccccatactgttctcctggtagtgattaagtctcacaagatctgatgtttttataaagggtttcccctttcacttggttctcattttctctcttgcctgctgccatgattatgaggcctccccagccacgtggaactgtgaattaattaaacccctttcctgtataaatcacccaatgtcgggtatgtttttattagcacagtgagaacagactaatacagacgcttaaggtattttgtacaagagtgacgtatttcttaaccctctcaatcagtattcttaaagaccactctcttcagttttgttttgtttttttgagacagagtctcgctctgtcgcccaggctggagtgcagtggcgcgatctcagctcactgccagctccgcctctgggttcatgccattctcctgcctcagcctccggagtggctgggactacaggcgcccaccaccacgcctggctaattttttgtatttttagtagagatagggtttcgtcgtgttagccaggatgctctggatctcctgacctcatgatccgcccacctcagcctcccaaagtgctgggattacaggcgtgagccaccgctcccagccactgtcttcagttttataaaaagaaaagtggggtggaaggggacatgaaatgctaagaaagtagcaacagttctcaatttactaatccaagaatgggcttgtgcttcaaacttgaagtagcgtgagaaggtggaaacaacagtcttggtaatgaagcctcccctgtccagtcctccagctcagacttagtctgggtggtagttcatagggagatatcaattatcctattccctcttcttgaaagtgacagaactcgacacttttccttgtgtcaggcaacatggcctgtgctgtacgttacttctttaagccttatagtaatcccgtgacttaggtattagttgtaggtattattactaatattaggtattattacctagtttacacatgagaaactgaggcttagagtggttagcaacttggcagagatcacagagctaggaactttagagccaaaactcaaatctaggcagttgaaaaccagagcccccgttgtggactgaattatgtggctctgcatccttataatctccagtctctttccagatgcacgaccagaccctctggctttaatcaagacgaatgcgtgttgaaaactttaaacaaattaaatttaacaattcaattgagcaaagaatgattctcaaattggacagcccctgaaccagtataggtttggtagaactccagagtggccacatggtcgataacatttatggacagaaaaaggaaagtgactagagagagaaaagggaagtgagggaaacagctggataggttacagctgagtgtttgccttgtttgaatctgcttctaactgttgaccccctgtggttgactgaagtttggctgctgtgattggctgagccttggctacttgttagaaaagtaggttccagtctgtttacacattaagttgggtcacagttcactacatacagagaaacctttaggctgaacttaaaacatataagatgtcagctttggtctaaacttaattaaacatgaattagtgtgcatatctttcatgtggacaagacacactgataattcaccatgccatccttagggctcagagagagactcattcctatttctgcaaacacttttaaactgcaacttcagccgtcccctgtgggaggcttagtgttgagagcatccattcatgtgtggcagctgagctgctcaggtttagaattccacctacggaggtgtgcactgcaagctgtttttgcttttattgacgctggcaattatctgaagagtttaggaaaattggaacactgctgcatcattttgaggcatttccaagaggcaactctaagtaaacaaatgaaacctgaagcaattttcctgtgtagcttttgaagggccagaattattttgttttgagtaagtaaacccaacctagcaccttcggtgtggactaaagaattagtacatgcatttctatccctatgtttaaacaaaatagaataaattataaaatctcatcacttcttgaaagcaatattgaatgttctaaataagatttctcttaatgtaaaatggagaagtttatgactcgcactaaaaagtaaagtgtgttcatttatcaatactaaaagtattagagtacttttaaaaatgagttaggtacatattcttttctttatgtatttactagaattctaacaatttaggatttaaatactaaactgacgttcttgagaatgaagaaagattagtttgtttagatctgcactttcccatcatttcctaactggggtgagtggtaaaggagtcataaatagggaaaaaaaggatattagcataagttctcagttcagagtcagattgtcttctctgtttgttgcaggtattgtattgcaaattccaaaattgtatcacatacccttagtcaaatatacatatgaaaatacattccagccctggcatggtggctcacacctgtaatcccagcactttgggaggccaaggcagatggatcacctgaggtcaggagtttgagaccagcctgaccaaaaaggtgaaaccctgtctctactaaaaatacaaaaattagccaggtgtggtagcaggtgcctgtagtcccagctactttggagactgagacaggagaattggttgaattcaggaggtggaggttgcagtgagccaagattgtgccactgcactccagcctgggcagcaatggagtaaaactacatttcaaaaaaaaaaaagaagaaagaaaaaagaaaatatgttccaaagtgaatatattttactagctaagccaccattaagatgttgtctgtctatgtatatattttttaaaggactgtgagtaagcagcatctaaggttattactgattaacatttttttctttcagctgagaaattcttaattgagaatctctatttcaaagcagcaaggctgatcattaagtactaactcaatactggcattagcaatggacacttaaactaattgaagaattcattgagtgcttgttgtgtactaggtaaagtgctcacaataaacatgagtatggcttggtctctttcttgtagctctcagcccagccttggaggacagagaggagatggaattgcaaacaggtaactaggttgtagtggaatatgaagaattcagtgaggatctacgtacaacatatagtgatcaaggagaatgggctcagcattagggtggttaggaaaggctttttagagaaagacaatctagacactgtggctcttgaaggatggatgcagctcaccagctgtacatacacaggcatgaaaccacatggtgaactcaggactcaaaattgttctgtagttggaacttgttttaaaatgcactcaggatttgttttaatcagataagacacacaaacacagaaatgactgtcatgaaggaagacgtttttattctcagagattgctagaaacaggaggcaaagcatgccaataggaccacacggggaagcaccaggatcagtcaggaggcagagagagtgaggagaagcatggcccagcaccttcattgtggtttccatgggaaggaacgaatgaggcaggggaaagcaggattgagattagctagtttgaataatttcagcagattcctgggctgtagggactgcctctgtttgtgggacttatgggatacctggacctgggggtgattagtacagggagatagtggcttgatgtatgagttccataaaagaaggttgatgggccagatgcggtggctcacgcctgtaatcccagcactttgggaggccgaggtgggtggatcacaagttcaggagtttgagaccagcctagccaacatagtgaaactctgtctctactaaaagtacaaaaaaaaagaaaaaaaagccgggtgtggtggcaggtgcctgtaatctcatctactcaggaggctgaggcaggagaattgcttgaacccaggaggcagaggttgcagtgagctgagattgcgccactgtactccagccctggcgacacagtgagactctatctcaaaaaaaaaaaaaaaaaaaaaaaaaaaggttgatgaatgaagggctatagattgattggtagtcatttgctgtctctaagaattggtttccctgggaaagacgatctctccctagtcagtgatatctcagatagtagagcatcaagaatacagaaaaaacaaaaatatagttaatacaaagcttcacagggagaaaggaggagatgagtggtagtatgtaaaaaaaaaatgagagtagagagagaataaagagtcagatcatggaagaacttgcttggtgagggtttgggctgtagtattattaggtattggagaactcttgacagatttggagaaatacggtaataccttagacctacgttttagggcagtccctcttatcagcagagaggaaggttgactgaaggagtgttatgtctgaagatgtagggactgagcaggagacagctgaaagtgtcagtgtgaaagatgctgagggatagagttgcatggtggcggctgggatggagaggaggggttaaagatgagcgggatttataataggatgtagccattatagtccttgactgactagctgtgggcaggggggaagtgatgtctctgtggacactcaggtttcaggtgagttgtaggatggcagtgtcacagccagggcatggaatgtgggaggtaaaaggtgtggggtgggaaagatgaagagttcagtttaattcttgttgagtttcagggggcttgttgaaatgtccaagccaagttatttaacaggtagttgaatttaagggtttggaatatgtcattttggtcatagaatactgtttctagaagcttagaaaaggaagtggagaaggcagcacagatagaattaataaccttagagaggggcaaagaaacggtttcctttaagaaagagaataaggttgagagcagaacgttgaacatacttgaaaaagaaactgatctctagcatgaagaagaaagcaagattgaatgtcacgaggaggataagggtgggttaggagtgcagtgaaggtttggaatgtccacctcgagccacagacccaggagagaataggctccttctagccaacatgatccattgaaactgtcaagtcttggctcctgggacccaggtgagtttggagacctcaaatgtatacagtctttcaaatgtgctgttgtgtactttagaaagagcacagatggcagattctggatggacccaagctcacagtattgagaaataatggcttgaatcatattggcaagaaggagcctaccctctcctgtgtctgtggctcaaggtggacattctaaacttcactacactccttatcctcctcatgactttcagtcttgctttcctctggagcaaaagatgattctccagaatcatctggagaaatgttaagagctctacactggatggagagaaaaagtgcttggagagtgggagataagttgggggaaatgctgagatctttgtgtagtcatgatgaagcccacagacatgaaggtgtcagggagttctaatgaaggctgttggagccaaggatattaagaaatagtgagctctgattcttttgcttatccacatgattcagggactcctggataacgacagagttgttggtgaatgaggggacttaggtctttagatagccatgtttatgttttatctcttaagtgcttgaaaagtttaaaatgtaggtttaatagccaataaatatttcatacacagttagaattacactttaaccctgaagttcatttactttaagaaacaaaaaaattaaaaaaaaaacttacatgtgaaaacattatcttttttctagccaagaggattctttgactatttggtagtctaggctattcatctccaaagtggagttcaaatataaatccttgttatgaccttgtgaaacaaaaacaatcattacttcctcaattaattcagccagagaagtgtttattttctgtgcagagcaggcagcttccagaagtgccaagtagccagggaagggtggcgttcattctagagagggaggcgttcctaataaagaaagagcagtcaaacagggttgcaaaaccgtcagctgtttaatgactctaatgtcttcttgggtctgttctccctccaaataatatatcagctctaaggatatttctcccaatggctatgtatttggctttctaattctttactttcatttccaaatcagtttgagtgttcatgacactctaagagcaaggaggaaagattaggaatgccagacgcattgatgttcggtatgtctctggctgttcactcattcacaagctagcaggttaattgatcttggggtagattcttaatatatcatggtgctaatgaattttttgaccttaggaggtctccatggagcccttgctgtcggccgtgtagtatgactttgtagctcaacagaattatagtgaaacattgtaacttaggtcagctttagaagtacattcaattaaaaataacttgattgcctgttgtacacgctgtacatgtacttgtgcatgtattttaaaaatctatttttagagtcattttaacattgaaaaatggaaataaaattaagactgttgccaatactaaattagcttccaaagtagtaattttggaaatgggctatcaagatatttacttgcctaaattgatttttaaaaatcattttggtggactcttctgttgatactcctgtttctatggaatggagtaggaattgtttctatggatgccaggcttaattctcaagtacatgttatctttctcaaacacagctgcaagaatccatgtgcttggtaccaatatttaaaaatagactacacaggcaaaacagtctgtgcattcacaggcaagcatgatattattttagagggctcttctaaattgtgtggctgtactgagacagctcaaactatcaggatgcctcatatatactctgacatctcctcttgtatgaattctgatgtgcagttggtcaatcagtttgagcatggagctattgtgaccagagctatggatgtaattcctatttggggcatttactgtagcacagaggcagttaaattatacctgggtccttttccactggctggccacatggggagatagtgagaaacaggaatagggcgtgagcatatgtggatccctcattcctagagcatatgtggatccctgtgtcctgagaaggtccacagcatcatcttcccaatacaaagaaaaggtgtgcaggtgaaaaggaaatgagtacctttagtctgaactggtagttctgtctgccctggctgagagactgaccacaggctttagccttgcctaaaccaacacttccatgtaactgatgggttttaagaacagacatattttgggcagaagctgaggaccttagtctcatcctaactttattatttttgccatcctttgttctctatgaatattaatgagagactaaggacattaaaggacagagacagatgccttcagtagctgctccagaatagagggagtgggaatggtcaggtcctgacctccttcctgcagcaaattccaacaagcgctgttatgtgccacctacacagaagagtggtgtcatatgctctgaggccactgaggcctgcaggcttgtgctccactttcagtgagaaagtgggtggcgtagcttggagaagagaaaacagattcctacaagaatagattttaaatatataattcagttttagtcttttcagaaattgaccacagccagtcataaatcatgttggagagtcaggaaatgattagcatctgtcttgggctaaactcctttggagcagacactacatttcactgttttataatgtgtaacacatgtttacattcttctagcatttattctgtgttacagactatttaatagacaccacccacttcccattctgcccccaaatgcccaacataataaggaagacaagggaagctgattgctggagaaaaattgtatacacatagacagttcttgatgaattttcattgaataaatgatgtaatataaatagcagaaatataaatagttgagcttttatcaatgtgaacaaacacaaacaggcttgtgacaaatggcctgttcagttttacattgctgataccaattaacctatgcactacacttgatggtttgtaaagcattttttacagcagttcatacattacctacaatgaaggaagacaaaatagcatgatctgaaatagattcttaccctgttactgcaaatgatacttgtcctgctgcgatgtgcctaccctttaagcaagaccagctcttcccttcaccttttgcctaggtccctgtacctctgacttaacggtagccaggagtgccctacccacagtttgcacatatgccacccatctggggggcacacatgttctttattctgggaataagatgaagttaccctgaaaggactctttgctttctagtctgccccatgatccttttctgtcagcctccaaggttttctggtttgctctgggagtagcaggaggtataccttctctcaaggactggggaacatttatttaatggtggtaaaattactggcagggtttgaataaagactgctttcaaactgttgacattccttttcccttgattgcttttgatatggagtgagtcatcttcagctggtagatggtgagaatgttaagatctttctgtttattttttccagatgctcagtggttcatgcagttggcgagttactcctcagtggccaaggctggttctttagggagtttggggctgggcatagtgggagtacaggagaacaactgcccccaccattcgctcttaatgtcctggggaatttaatttttagccaagtcaacttgtgtttcttggagctataaaagggactgtatttaaaatttttaatcacaacttctgcctacagaaattatctgttgtattatccctagtagacaagaaactacctttatttctgtgtttttcactttttaaattttgtgtgtgggaatgcttctgttaactcttgtttccacagccactactgtttccccatttcttttctcaagtcacatataagtaagcatttctggaattatcatactgcaaactacattctccccgaaatattgaaacacctcagggaaacttcctgcattctcttaaaggttttcacttgcttgcttgtttgtttgtatacgtgctcatgtgtctattttttgtaagaagcttaatattgggaattttttttctgttatgagttgaaatgtcctagacgattaaacacaaacacacatgatcaaagccaaataagaaaatgcttctgtgcagtcataatgatgagaacaacatacaagtgggggaaactcctgtttgaaaatttccaaaacaggaatttggtctagcaaacatgaaagcagtacctgctaaatcctgcaccagcccccactcccagtatgcttgctacagtgatattcatctcccacaacatgatgattgcttctttggacaatatcaaacccttcttcagaagccttattttgtaaacacttgctttagaagtaatggtcaattggccaggtgtggtggctaatgcctgtaatcccagcgctttgggaggctgaggcaggcagatcaattaaggccaggagtttgagaccagcctgcccaacatggtgaaaccctgtctgtgctaaaattatgaaaattagctgggtgcagtggcatgctcctgcaatcccagttactgaggctgaggcaggagaattgcttgaacctgggagatggaggttgcagtgagctgaaatcgtgccactgcactccagcctggacagcagagtgagactccatctcaaaataataataataataataataataataataataataataataataataatgctcagtagaaattttaactttcttttaaattattgaaagaatattttcttatagatgttctaagtcatctctttataggagctattactataattagctagtttattataatatcacaaactttgataagttttatgggattaatgtcacaagtgttgataagttttatgataggattgcttagaaaatggtatcaattcaggatttagaagcttgagaaaacaaaggatatgatttagaacttcagtaagtgaatggcttttgtacatttgttattttagggctacaaacaatatttatacattcatatctaaatttaccctgaaagctgaaaaacatttattaataagggaaagacttataaagttaatggtatatctttttttcctaaatgtgatgctttagaacacatcatttgacttacgttagaactgatttcatgtattaaagaatggcattgaaacaggattctgtttcattttttaagtcttttttgctctgtaatcctttacaaactatctcttgaaaagatttattatttatattttctctctgcatggagtgttatgttcatgcatgtttctgtaagtgttgataatggtgagttcattttcatccttgggcacgtggattacagttgacataattggctatgtttcatgaatgcccccatagttcttggccctcaaaggtgatgaggggctctagaataatgggtggttgggagtgctgaggttttcccttctggaatgtgatgcaattgaagagaaagaacagttgtgactgtgtggacacacacatgaaaacagtcacccagcatgctagatacctgataaactgcagctgggagttctaaataacatggaagctttggcactggcacgtggcttcccatttcccatttctctaatgagacatcctaaggatataagaatagggaaaaccttacaccgccgctacaaactagaaagagcatcatcattatcataatgataactgatttgttgcatgcttccatttgtttaggtacccagccaagtgccttacatgcattatttctttttcttcttcaaagcaacaacaaaattctggtttaggtacattactgccttcatgtaactgatgaaggctcaagggtagtcagtcaaataaccaacccaagtttgcataactttgaagcgacagattctatatccaaatccagtttgacctctgagcccatccctctactgttgcactagctgtatcctgaaaaataaaggaatgcctgctagatttaatgtctatataaccaggctgaaggataaatgagaactgactcttcctgaaaccctgtgatgctctggaaaagagctagccaatgcctaccctcttgtatttggagaggccaaggcagaaagtgggataggtaggagttgctgattgaaatcccttctgtgactgtgaaggagacgtaccagaaagcagcattgcaacagtgcatgactcagacagaagcaacaaccagagagctggtcattcccttatactctgcaaggacagacgatgagagacttttccttgtacctagtaaggagacacagccaaagagactgcatatccttaacacagatgggggataaaacctgtctaggagcccatttgtcttgaagggcctgccattggcctttactctctctcactcaaatgaaaggagcaatgaaatgtacatttgtaccagtctacccaccgactcctggtattaagcattttaatggcaaccagctgggcagtaaatatattcagaaagattctacctgcatgccctgcttatggataaacaccagatctgagttaactcctactggtccaaggatggagtaaacaagaaaaaagaaaacataaggcccatgagagatcttgcaggatagaacaaggaagataacgtaacatttaaaatgcaaaggaacaacttacatttgacaaaattattacaagaaacaaattttagagtgtcatttttagataccatctgtcttgtgtcttacaatttgaagaaacctaggcgttgaagtgaaggaagccagattgtgaagggtggactagctgtgaagctagggaagagaaagcattgaatgggacatagatcttggaggcagattgctgggagtgagtccaggctccaaatttctagccatgcagctgtgggcaagtcccttgccctttcttggtgctacagttttcttatttttaaaatgagcatcacagtacctacatagtgtgattgttatgagaacttaaagtatatcagcagaattaaagcatgtattggaaatagcagaaaaaatcaacactgttaaaaaattgaatcagtaacaaacttaagaagatctcccggaacccagtggaaaggattaaagtgataaagtagaaatgaagattcgtgtatgtgcaagatacagaatggagatccaccaggagaaaaattgatgttcctcaaagagaccagaacaagtggaatgaattctaccaccaagatttcacataatttttagattaaaagggctatatgcccagaatataccagctgatgccaagaataatcttaaaatattatgtattttaaggtaagaaaaagaattggcttaataaggtaaaaaaaaaaaccagaaagtttactgaaaaggagaaaaatctacctgacctcaggcttgctcttgcatactcttgaattcaggagatgttgaaattaatatctactgttgtgagggttaccgcctaagcatgtttttaccagaccaaggcagtgtttacataagaagaaagtagaaatcatcctcaaagtggaaagaatataaaatatttccacctaatagctgcttgaaaaaaaaaaaagacctgaaagattccttagttggaaataagcataaagaaattaggtgagcctggacaacatggtgaaaccctttctctacaaaaaatacaaaaattagccagtagtggtgctgtgtgcctgtggtcccagctactctggagactgagcagggaggatcacttgaacccaggaggtcaaggctgcagtgagacatgattgcactccagcctgggtgacagagcaagaccctgtctccaaaaacaaacgaaaagtgtccaagaagagcaagaaatcagttactagttcttatccttggctggggcatcaaaggacttaagagaatcaagtggacttgccattgagtgttgacctgactctgaatgtttgtggagttatgcaggtgattcttatgcgtggttaggattgagacctgctttagcaattttattcaagataaaataaatacaaagaaaattaggcaagtgaggatattaccaaatatataaaaatatttcttttattttcaaatttatgcaaatttatttgaaaacataaacctttctaagctattaaagcaaattttaatatattaaacaatttttttcaaccacaagacttaattttatgaaaaagtcttttaaatgtatctctaatttacgtataattccaatcaaaatcataattgcttatttttcgaagcagatgaaatctaaattgcatctagaagaataagctggttgcatagcaaattttaagaaatgaacattgtgagagagtcttgtcctactggttggtagcatttactaatataaattaaaacatttacattggggaattataaatagaaagacaaaggaaacaatagaagattcaataacagggccagtgttaaagagataatacagtttataatgataaaagggacaatttatcacaaagacataagtgtttatgtggctgataacagagcctcaatatacatgaagcaaacattgacaattaaaaacaaatagacaatttcataatcatagtagcttttaatacctctctcagtaattaattgaacagctagaaaactcagtaaaaacatagaaaacataaacaccctcagccaccttgatgaattgacatttctagagtatgagatccaacaatgcagaaaacacactctggttaagtgcatgtggtgcatttactgaggtagaccatatgctgggccataaaacaagtcttaatttaaataatatgtattcagtgacctcaatagacttaaatgagaaatcagtcgcagttagctatttcggaaaattccaagtatctgtggatttaaaaatatatatatcatgtgtccaagacaaaaccaaaagggatttagacagtaatttgaactgaatggcagcaaatatacacgtcaaaacatttgagatgcagctaaaacagtgcttagaggaaaatttagagctctaaaggtttatattgaaaaggagaaagatgtaaaatcaatgacctatggttctactttatgaaatgacaaaaaaggcaggaaagtaaacacaaagtagaagggaaaaactttttgttaaaagaagcagtcaatgaaatgcaaaatagacatacaataggaaaaataataataaagagttgattcattgaaaagatcaacaaaattgaaatactcctagctagaatgaacaagaaaaaaagaatgcaaatcaccaatattaagaatggaaaaaggggattagcattatagattctacagacattaaaaggatattcagtaaatactatgaatacttttgacaacttagataaataggcaaatttcttgaaaaaataccacttataaaactaatacaggaaggaataaaaaatccaaatagccttgattctattttaaaaattgagttcactatcaaaaacttttcccaaaaggaaatttcaggcctagatggtttccctggtaaatgggtgaactcattttatgaggtcagagtatcgtaatcccaaaactgcaaaggtattaaaaagaaaaaattacagagtaatactcataactatagatgtaaaaaatcctaaacaggccaggcgcggtggctcacgcctgtaatcccagcactttgggaggccgaggtgggtggatcacaaggtcaggagatcgagaccatcctggctaacacagtgaaaccccatctctactaaaaacacacaaaaaattagctgggcctggtggccggcgcctgtagtcccagctactcgggaggctgagtcaggagaatggcttgaacctgggaggcagagcttgcagtgagccgagattgcaccactgcactccagcctgggcgacagagagagacttcgtctcaaaaaaaaaaaaaaaaaatcctaaacagaatattagcaaattgaatttcaagcaatataccataatcaaagagtttaatattcaaacatcaaacaaaattcagtgtattaacaatataaaggataaaaaccacatattctcattaatagatgcagaaaaatatttgaaaaatttcaacagcaaaccaggaatagtaaagaacttcaaagtgataaagggtgcagctattaaaaaacaaaaaacaaaaagaaaactgaaaaacaacaacaaaaaaaaaaccacacagccaacataattgagggatgcaatttagacaggaataagaaaagcacttagcacttttacagcacttttgttcaaggtagtgctggaaatcctagccattgcaagatgggaataaaataaaaagcataaagaagtaaaactgtcacttccacagatattgcttatgtaaaaattctacgtaatcttcaaaaacaactactgaaaccaaaaaaggaatttataaaatgtgtagaattaagaagtttgtattgaaaaatcagttatagtcctacatactattagaaaaatatttagaaagtgaaatttaaataatttctttgcagtagcataaaaaatataagaataaacctaacaaaatatattcaaaacaaagcttttatgctgaagacaaaatgaaaattgctgagagaatataaaatgacttaccaaactcaattaaaatttcaggagacttttaaaaatcttacaaactgattctaaaatttatgtggaaaaacagagatcttggaataacaaaagcaatttaaaaaaagaattttaaggacttaacctgcctgatttcagcacttattataaagcaacgaaacctacatatacctcatggaatagaataaagaatccagaaatagagtcacatatgtggtcagttgattttcaacaaaggcatcagagatattcaatggggaaaggctagtcttttcagcagatgattgaaaaattgaatctatatgtggaaaaattgaacatcaaccctttatttctaacaccatacacaaatattgcctcaaagtggatcatgaacttaaaagctaaatatatgcaacttccaggagaaaatctttagacttcaaattagacaaaggtttcttgctattaaatagaagataaaaaacatgaaactttaaaaagtggttaaattggatttcatcaaaattaaaaacgtattctctggaagtaaagatctaactaatggtaatatttcagtgcccagggcagaaatagtgggttggttaatctgtgctccagttattgacaggtggtggctgtctggagtcttaataagacagttggacgttgttctggattcagctttatgtgcactgataatttaatagtatctaccctgggcaagagagtggaacagtgcagcacttgtataccattcttgacctagttagggaataaaggtgatgttattttctacaaatgagcatgggctcccacatcagagcatgagcactaatgaatgtgtgcaaggtggtaagtggcatacaaggtcaaaagaaaatggtaggagatttcggaaaggagagagattacttctggctctgacttctgtgcaaccaagcctttcatgaattctgctaatatggtctacactttgagagaaaattggtggtttattgaagtatgccttccagattttagctttgggaacaaaataaatcaaagtcttggtatgattcacaatatgcattatgtatattcctggcatgacaatttccacacctccagattatgatgtctatgagcaggtaggacattgtaggtggcagataggttgggggatgaaggtgggaggtgagagggaagaggaaaagcttacctcttctctgacattctcagcattgcacagaaaatcatttgacgccatgacattctccttcacttctgtggctcaagtatatcttcacacacagatgcagtgtctgagatgcagacactgaaatgaacccttccgttcttttctcatttaagtcataattctagaagttatttttcattcctggccagtgaatttctaaggctttctgatcattgaagggcattgggaagtaattatccttctccagatgactgtgtaacttttatattgctattccactctgcagtcacccagccattccgtgtgtgtgtgtgtgtgtgtgtgtgtgtgtgtgtgtgtgtgtgtgtgagagagagagaaggagaaaagagaaagagtatgtgaatgtgtaaactcactcctctgctattcaacccctcttagagcgagaatgagttctgaggaccatggcttatctctggcttcccattcccttttatttacaaataggattttcccccttccttcttaaaagagcttttaattttagtgttatttaatgttggtctacttgaactcctttacactaagacagagagttacagctggatagataaatttttatgttgactgtttggaaaaatctctatgtattttctatcctttttgattttgagtcatagaatttcagggtttgagagggatataacagtttagaagccaaggaccttcctgacttttgagactcctgagttacatttctgtcatgtgttttttcagcctgtgtttgaaacacagctggagacagagattttgttccaatcaaatgcagctcgttgtatctgtggaaaagctttgacccttaaaaattctttattatattagccataattttattccttgggaatcatgtaaataaatcatcaaacacctcttcaaacataaaatgctttcagatattgaaagagtaccatctggaaggcttttcctctttcaagcatccctagttctttctgctcttcctcttcagtcttgttttcagatccttttgctattggttgttctttgaatacttcagccaaaagtgagtccagaagtccagttctgacacctgttctctactgaataatgaagtctggggttgagttgctgatttggaggaggggcagtgtccatttcatggcttggtggttcaatatcttgttaattgacacccctaagtgtttttcatgcttgcttctgtgtttgtactcaagaactgactcacatttcttcctgaaaaagtccatcttgtcagagttgactcaacattttgccatccgctgtggctttttgtatcattggcacccaagatagtgacagctgtgttgagcgggttagagctgagtacagaattccttagcagtcttcttacagttagatctatattaatgctggtttttggtttttttttattattcttaggtaaccagtggtttgtgaaagcatatctggaaaccatttttattgttggatttatacttaaataatatattctgtgcagaatcttgaaaaactgtttaagtctgattagatcatgttagtatatggtcagtaataatggaagtacaaatacagcatatagaaaactaacttttgagaacattgtcatatttttgtctttcttttaaacctaatttctttgttctgatttaaaaagtgttgtaaacagtaattatttttgaagccttttctagtgttccaaaatactctagtcataattatctttccatgcttaaaaatgtaggctttagagtaagacttgcctgggttgagtatcagctgctgttaaagtgaccttaggcaagcaagttaatttttgtaagcctcagtctgcttatctataaaatgtgaattaaaataatggctatctcctgggcttatttttaggacaaaatgcataaaaagcacctagcaataaataatgtcaataaaagttttttttgttagtattattttttaaattgttacagaattattctggcttttcataaaatgaaaagcttataagcttgtcagtatgttttgaaattggtagtgttttataatgttttaattatgactcacagtgcaagttctagtttctgtttctcagaggattacatgctataggaaaggttggatattttaagtacgctttcttttattttcactaatgtgcaaactagttcaattgattatatcaaacaaggaaagccaaagtaggaacctcatgtatgtgaaaccctctggtaataatggtcaactttcaacttcctgcttacgacattctcaacaagattttctaaaacttcacattctgatgaaattatatatatatatatatatatatatatttttttttttttttttttttttttttttgagatggagtcttgctctgtcacccaggctggagtgcagtggcacaatcgcagctcactgcaagctccgccttccgggtttacgccattctcctgcctcagcctctcgagtagctgggactacaggcacccaccaccacacccggctaatattttgtgtttttagtagaggggtttcaccatgttagccaggatggtctggatctcttgacctcgtgatgtgcccatctcgacctcccaaagtgctcggattacaggtgtgagccaccacacccggccgaaattatatttttatacatcagtgtggctaggtttaagagttcctttaagagtctgtttttattattaaaactagtttatgtcttcataatgactcatttccctaaagtgcgtttcattctcaagtaattctgatccataaaccaagtcattctctacatattcagctcttccttttttagggtcaggcctcctcaaacccagcgtaataaacatttcaagtcattttttgttacatggtctccttacctattaaaacatgtctatgttgttgatctgcctttattaaacataatgtaatacattaaaaattaaaaataagcactctgttgcaaagtaagattttaagagcagtaaactttttacaagaacgttagaaggaatacacattttgtttgttgaaaagcaggtaaactgaagagatttcaagtggcttggacatatgtttcattacagatgtttccttgaatccaaattaggctaaactctgaaccttttgacatgagcacaagaagaagagggggcagtgagggttggcagttcatggggagatatgtgggtgaaggaggggaagcatcccaagcaacacaaaggcctggggcaaaagagtgctgaaaggctttgagcagagaaatgactgagaaggcttccattttagaaagactactccaacaactgtgtggtgtacagagtgcctccatgctgcacagttcagggggtgcaaagaacaatgatcattacaaagcacggtgaaccatagaaaaccaactgatataccctgtagttctcctggaactgctctcacctggctttaggttggagagctgatgaatccttcctgggatcccagctttctaccttaggcagtgggtgaactgatccttagctatcattttctctagaattagtcctgcatagaggagtctgacattggcctaacttcctctccaggttcctgggaagattgcccccctgggaaggagacttccctccaacaaggaaatgtggtctgagctctttcttcaaggatacatctgctattttcctaagtctgttagatgctacctttattcagtcaacaagtatgcattatgcacctgttttttgccctgtagtgggttggatgcgtcagttaaatacaagtacccccacttaaaaggaactcaaggcaaaatgcttaggagaagatataggccagtgagccccagagtcccttaatcacagatgataaactgggtgtcctgctgtccaaaccaggcctgccagttgtattttgtttcactggcagtgtcatgattttttaaaaaaacgtgaatgccttttgttagaacatatcatctctagttcctcaaaaatctgccatttcacactgattaatagcatgccaaatatacacactgatgttggctacctggcccctgcatacatttgtgggagtcagcgctgcccagcatcctaatagtggggagcctgttgttggatcttgaaatttccaagtcaccgaaagttcctggttagataattggatctactatattttctattcctccatctgggaaaactcatccactgggggtaggatatatttatatagaaaagtaactttctatttctctctggtaataattttaaaaatacattatattattccaacattaaatatatcaaaatattttttaaaattagttattagtgggagatttgtcatattctgtgttgtgagtgcactgcattcatattatagcatcttgtcttcatgtcctattcttatttaatctatgagttttcaccatggaatcaaaatgggcaactgcattctaatttataagcttgatagaaaactgtagaccgaaaagcacattttaattgttagaattacgtatttctagaaacccttgctataagacaagaatatcaaaagtacattttgaatatatgtaatatacacaaataaatgcatatgtggtcatagaacaacattattacctggcatctctgaaaataataaatatgagtttaggatgttaatgaagaacacgtggtctttgacattcatttttgcctggttttcatgcttttagggacttaaaaatgaaagaatgagatcaggttttttgtctaaactcaaggtgtcttaagcaacaaataatactgcttcatttctctcattttgacaactaaagatatcagcaacacagttgcatagctagttagcaacaaatacaaagccactgtttttacccttaaaggaatctaatgtacatattttatacttcgtaaaggctaaatgtcagtccatatttgtgaagcaaataaattggtggttttaggctgtcacggaggctcactcctgtaatcccagtactttgtgaggctgaggcaggaggattgcttgagcttaggagttcaagatcagcctgagcaacatagtgagacttcatctctaccaaaaatttaaaaattagctgggcgtagtggcacgtgcctatagtctcagctactcgggaagctgaggtgtgggaagatcactaaagcctgagagttcaaggctacagtgagccgtgatcacgccactgcactccagcctgggtggcagagcaagaccctatctcaaaataaataaataggcagttttatgtttatgaacctgtacatgtattgttatacaacattttcagcagaaaaaaattcgtctgcatttaacagtgtcacaatatgactcagttaaaactagtaattttaaaataaaaaaacacaacaaaaatacacatgtaaaaaactatttcacaccagtaagaaaaaaaaaaagaattaaatgctttttgaccataaaatctgttgggtaaaactggaactaggtctgtgatatatgtatttacctctcatattatacaaaaaattaattttaatttttaacccacttatcaaaaagtttactcagacttaataacctgtgtgttaagaaattgcttgattagtgttacaagtactgtacatcataaaatatgttgtgtgggtgagtagacaccaggtaattacaatgagttgttaaaatgtcagtttcagcagataactcatcataataaatatcagataccaaagtgaggaacaagatgcaaattattgtaagaaatatttaaaagctagtgttgacttttaaacctttcatccacattgagggtataaaataatgtagtttttggagattaaagaaagatttctatcagagagcatttctctgcagagaattgtgctgtgagtcctgcctcatccagttgcttctcccttcatctgaagagaaaaggggttcagagagacttttgaatgacaataggtttttcctgcagatcttggtgggctcagtggaggtggggctgaacaagcagtcattctgcagacgtgaaggagagatagacgcggagatcttattgtagagactcccagcttttgtttagataaagatccatgagtgtttcctgtagaccatgttgggccatggtcttgaaatggtaggaatgagattgattcaggtcctgttcaatagggaagtctggagagaacatgggacctcagttgtcaaaaggtggattccaaatgctaatgagagtatgcagggcttggcttcatgggtgtgcaacctgtacagtcgcaaaggccatgcatttagaagggccccttgtctggttaaatgctgtgctgttgccatattgaaatgcttaataattttgaacaaaaagcccatgtcttcattttgcagtgggtcctgcagattatgtagtttgtcctacatttatggcctacattgaagaaactgtagatgaaggggtcccagcagtgcaaaagggggtgttcctctaagaaatcaccaggcacttcatgggaaaagaatagactttaaatattcttcacactgggttggtaaagctagctgaccacctgaaccagtccggtacgacattcctgctcccttcacctctcctgtatcatctacctccagtcctttccaacccagaggtgactaaaacagcttagaaagaggaggagaaggttttgggaaaaggagagaggttttcatatatacctctttgctgagtggtaaatgttagcctgcagcagatgctagctgatgaaggaagctgccgtaccaccgaatgaagatggacattctaataatcaaatagaggctattttggctcaaagtgactgtaggtcttttattaaattaaaacgattaggaaaaaacatagaattatccaagtgttaatccaagggtgggagaagaactgctacactgaataaatattaagaaaaatgtgaagggcaaaatgaaattgcttttgaaattgcatctctcaagtgatacttattcagtgtattgattacatgattgaatttaaagaatctagaaacaccgagtgcttttagctcataaaccttaccttttaagtttaaagtggtcttctgaaagctagcttaaatttaattgtgaaactggactttttgtaaattttatttattaatctaagttgatgataaggaaagaaatgttagatttttcccatttgtcattagatttgtgtttatctagttgttggcttgctgatagtggcctaaaatggaaaagtgtagttttccaattcagttccctttaaagtatggaactgtatgcattaataatatttcttcagaagacatgtttaatgttttggacaaataagcttgatttattataacttaatttttttactggcagtgacatagattttttttcattctagtggctattccaaaatgacctgaattaggaaaatgttgctagcttttaatacatttctactgctattttccatttttatgcaatgactttgtaggctaattatagaaaattgcatttggtcctcattgcgtgggtgtgaaattaactttgtcgctgatggactgacatttagagtataattaagttgcatactttcctgggattctgtgaactatattttaatgcccttcagtgagaaagagatagatgccttttaaagttttttgaaggctgttgtagttggtcaaattttacaaactacgaatattgttatttatttttacattaaaaattttaatttttttaattaaaatttttacattaaaattttaatttaattaaaatttttacattaaaattttaatttaattaaaatttttacattaaaattttaatttaattaaaattttaatttaattaaaatttttacattaaaaatttcacaaagaattttcttcttaccagacatccatgtgatttccttctggctataaaaaacctataggggattttttgtatgcgtgatttaacctgatattattttaaatgtaagttctatcgatatagagataattttatttttgaactttagctaaaaattattttaattgtcaatatttctgattttacattaaattagaaaagactaggtggggcatggtggctcccagcactttgggaggccaaggctgggggattacttgagcccaggagtttgagaccagcctggacaacaaagtgagatcccatcttaattaaaaaatcaaaaaaattagctgggtgtggtggcatgcacctatagttccagctataagacaggctgaggcaggaggattgtttgagcccaggaggttgagactgcagtgagctgtgattgtgccactgcattccagcctggatgacagagcaagaccctgttgggcggggtggaggggtgggggtgtaaaaaaagactgctgcttaaattctgatccttgaggagtagggcaccataggaaataactatatttgcatcatttgtaatgtaaaattcaatattcttgaagaaaatttgaaagcagatggaatggcattccaggctagtggagactgggggtcacatttgcctctcactcaccactgacatcataagccattactcacagcagttgagaataccatttggaagtataatcacaaaaccttcttataaatatctttctgtatattttcatttctttcttcaatacatttctctaattttgttccaggctcgcaggaaggaggtatttatccaggaacggtatgggagatttaatctaaatgacccgttcctggcactccagagagactatgaagcaggtgctggtgacaaagagaagaagccagtttgtaccaaccccctctccatccttgaagcagtcatggcccactgcaagaaaatgcaagaaaggatgtccgcacagctggctgctgctgagagcagacaaaagaaggtattgaggcgttcaaatggtcattttccccacaacatggtgtccaatgaggagatcacctccaaagttgtttgttcttcagtattatattttcagacaggattgcaataagtacttagaagtgcaagaggctgacagattctttaagccaatgtaacctagtgtttaaagtgtaactcaaaataacactaaaccataaaggaagtataacagaaaaattatgtttctgataatggttactttgatactttctttaaaatctctctctatatatatgtttttggacttcctagtgccttctagaaaacatgcttagctgctaggtaggttaatccagtgatgcaaccaggactctttgatcatatagtaacatcccaacttactgtatctagcttctgtctaaaatagttatttgcaattagaaattattttattatttcttaattttggcggggggaaatgaaaataacatgaagaaaatggaatgcatgtttgcgtggtatgtccagtctcacaatgtgtcatcttaaagtcctggttagtgtcagactcacctctggggtgtgatagctgtgtcagctgcagacctcaagcctcctgctcacatgtgtttcatttaaaccaacctcctcctcctctccccctcccccaccatcacacacatattcctttcacttgagtatctgcttcaaagagtacaaagttcaatgaaaacttgtggtgataataaggaaataagtaaatagaaatttaaattttgcccttctaatatgctgccaagactatcgatgccttttattagaaaagagagtgagaaagctagaagctcatgctgtgtggtttgattaaaattaaaactaatatgttctctccaccattattattaaagcataaattaaaatgtttcttttatttggcctcttcagagaacttctgatatctcatatgtaacacctagttgatggttaacctgaatgcactatacttataaatatttatgatacatattgtcatttcatgcgtgtcttttccctgaaatttcatctttacattaacatataaatgttagtgttctggtgtaggtgctgcataaaaggaaacatttttctcagtatgttgcatggtagaaaactaaagcactgagtaaaagaaaaatagaaggctttccatagatgtaaggcaaaatcagaattttactctggactctacaaagccctgcagacaaccactaagatatgtggaggttttcaaaactccccacaaaccacatacacaagagccaatgaatttcagctgatgtcactgaaactcatttgtatttcttggatgggatacatttcaattatgcctgtaatgtgtcaaatgagttatttcataataaattatttctgctggactttatattgtgttataaaaaattaagaaaacactttgttgtcattgaatatataaaaaacactttcctaaaattttacttctgttctgcctttaacaaaactcatttctcttttaggagaaaaaaagaacacttctagttggatcaaagattttattatctagctgattttttttttttaaatcaacttacatcctgtttgtttctgaatgactgggtcatttccaacctggctgatagtgaaaggaaattgtttctgtcctatgggtcctgagaggctaatataaaatgagccagtggtgtgtctcccatgtataatgggaatacaggagtcctttatagccaacttcattggctgtgtcgtctcagtgaagggtttctctgacagggagtgctacattttgtccttaaaaaatattatattttagtagattatagtgtatgcgaagagttataatttgtactcttaccctgtgtcttaaaaagaaaataccgtatcagctgatgaaagcagaaacaccaaagtcatctctttaacaacaaaattacctgtcacctttagtcctctgaaagcaaatattttaaccaaatgtcttcagttccctcgcatgtagagtaaattgcagctttagacatctaaaagccataaggaaaaaaaatccattattttaaatgagttcagttctttaaatcactgccagagcaaatgtctgggaaagcaaaggctccattagctatgattcaagtatttattatctgacatcggtcatatctctttggtaattctaagacacttggcctgagcgctgctctagtttgcctctcaaggcaggagaacagggtctgtgctcattcatgcgttggctcctgctgcgactacgaataggcgggttaactgtttggtaatttgtgtgccagggaaatttgggcaagagtcaatttggcaaatggactgaggctctgaagccactttgaataagctaatgagtaatcatcatggggaactttgcctccggtaatccacttcccattttgagccagtaacccaggatggaatgatatttggaggttttttttttttaatcttgtctatcatcttttaatagaatttccattctgatttctttgaacagtagggaggaaatctgtatattttcaaacattttcttcgcattcaggaagtataaattctggccctgaagaaggaaagaccttttaatttgatcagaactttgaatctgtgtagccaaaataataaccaggaaattcagagggggaacaattcttttcaccagtgaaaaaactaaaaataactgtgtgtattagatacagctccttctatgtggcagcgcaatataaataggtgagttgcatggcaatagatgcctcagacaggattcttagttttgagctggtgaagccaatgttcattgagaaggcagaaagggcatttgttgtctggtttatagaaatagttggcttacatcgtggttcagcatggctagcaaagcctagaggactagctcttcccagccagcatcacaaacaagtaccgtctgcagagctagtctgcagcaggagatgcttctgctgatgagaaatggatgctgcagctttcttttcaccctgttgatgccagacagcactggtgccctcactgctccagatcctgagtggtccctccccaggtccttcttttttgtatcactcattacctatttgaagcctaagacaggtgcatttcattagccaagcttagactacacagaagaccaggaaagcaactactggacatatttagcttctacaggggagaatcataaagtagagaattctcctaacataggaaggagtttccagtgctagacaaccgaagaaatggaaatgggtcagaaaagaacaaaatatttgttttgtttccttgatttcatatgcccatttcttcttacaattgtactttattctgccatttttattccatgttctctacttcattatatattgcttaccacatatataaatgtattttcattttaaattgctttttagactttcattcagtaataccatggtagagaatcatatgtaataaaattgtcaggagaggatttaggacattttgcacatgaaagattatttagctcattcctgagtcttttttgttgcattgttacattaaaaaatgcattttgattccccaggagcattgcagagccattgtcaagggggagttggagattgagatctgtggctctgagtagaaatttcaaggagagagcagtttgcctgatccatgtagatagaaatgagccagccgggcatggtggctcacccctgtaatcccagcactttgggaggtccaggtgggcggatcacaaggtcaggaattcaagaccagcctgaccaacatggtgaaaccctgtctctactaaaaatacaaaacttagtcaggtgtggtggcatgcacctgtaatcccagctactcaggaggctgagggaagagaattgcttgaccctgggaggcagagctcacagtgagccgagatcgcacaattgcactccagcctgggcaacagagcgagactctgtctcaaaataaaaaaaaaaaaaaaaaaaaaaaaaaatgagaaaaagaagaaagaaatgagccaaacctctgtttccagggcttgccttcccactcttgaaactctagattctagattaagagggaggggcagatgagaactgtatagcccagatcactgaatgttagccacagcccctttgaaattaaaaatgaaaggaaaaaaatgaaaagatctcttaatatatcttgttgttatgtatttgtttatcagattgagcagatgggttggagtgcccagggagagaagaggacagggatgcaacgagccttaaaagattttgggagagcaatcaagagtatggttaaatgtcgtaagagtattttgtggtgtggcagatatgcactctgctttctcaatttataaatggctgtaattgctttcctctcagttttccactttgaattagaactaattgcctttacagcgctgctttgctcccacctacatagttttccctttcattctataaaaccatgtgtttggtgcctcttcattcatagcttccagtttgggtgctattcttggagcagccacccactttctcactaccagtgaagctgcgttcattcttctgagctcttccacacaatccactgctttttgcaaaagagtttggtgttactgctccatgcaaagtttccctcggcccctgcttgaaagtggttcgaaggagatataaattcgacaataacataacaaagtcacctggaactccataatttatgtatactgtggttcctttttaacttagtatgtggtcctgccatctgatcatctctttaaaatttgtgtagtcctacaatcaaataagtggaatttatggattttcatatcctttgtagtttctagtgtggttccttgtacacagtttagatattttctcttcaaaagttctttaagacattgcttgtgataatgtgtgaacaaattaataccaagatgactcaaatttaaacaagtgcacattcactgctgttatactgacctgaacaatttttttaaaaatctgtaaaagtagtactggaaactactttattgatgataggaaaaaatataggaaagagccaacgactcttgatggtgataatgacaggaggtttcaaaattatatgattaaattcagagagcttaagggattccccggagatgtaatgagctcgcagtgtatgccatgtcctattaaatcaactcatttgatccttaggatgttgttattacatactgtagaggctattattattgcattttaagcataagtaaattaaggtcacagagaagttgaacagctgtgcccattggcttgaagacaagcagtctgccttcagagtccacatacttaactgctgtgtgactttcctatagccactcggtggtagaactcagatctcctgcttctcaggcttcctatatgtactgtatttcttccttactgctagaaaagtggaaaatccttaatactttggattctttgtgatttttatgtcattccctcaagccatttaagattgagagacacagattttaacacatgtattcccccatagctctacaatcaagagaatatcccaaagtttagagggaaaaaatgcctatatgatattggatcaaaagaccagctctaaaactcttattaaatatatgatcgacctagttcatgcttcaaaaagagctaaaaacatgaaggtcaggtattcaaaagacattcaaaatgtattaataaagattgaaacaatcaagaagagagaccacagaaaagattttgcttgaaatgggtcatttttctacatatcatggagaatgaacatgcaggaaattttttaagttccagggcacatgtgcaagatgtgcaggtttgtcacataggtaaacatgtgccatggtggtttgctgcacctgtcaacccatcacataggcattaagctcagcctgcattagctatccttcctgatgctctacccctgccatgccccaacaggccccagtgtgtgttgtgcccctccctgtgtctatgtgttgacattgttcagctcccacttataagtgagaacatgcagtgtttggttttctgttcctatgttagtttgctgagaataatagcttccagctccatccatgtctctgcaaagtatgtgatcttgttcatttgtacagctttatagtatcccatggtgtatatgtacgacattttctttatccagtctgtcactgatgggcattcgggttgattctgtgtctttgctattgtgaatagtcatatatgaaatttataataatgagttaggacttttcagtttgatcacagtttgatcagcttttgcatttttggtagaaataccatgtctgtggtgttgtgtttttcatagtacataagattcaaaaggcgtatgatccccagaaaaacaaatgtttgttatatacactagtggtttgagaaacttactggctcataacatttattaaaattgaagccaggcttggttgggtgcagtggctcacacttgtaatcccagcagtttgggagactgagacaggcggatcacttgagatcaggagtttgaggccagcctagccaacgtggtgaaactccgtctctactaaaaatacaaaaattagccaggtatgttctcgcatacctgtagtcctagctactcaggaggctgaggcaaaagaatctctcgaacccaggaggcagaggttgcagtgagctgagatcaccccactacactctggcctgggcaacagcgagaccctatctcattcattcattcattcataaataaataaataaaggccaggcttttgaacatcaaaaagcagttattcaaatttaatctaccatatgaaattattaaaaatcatgtatcatgatttgcttatatttaccttttttaaggacaaaatatagttccttcttcaatgccatttggtacccatttcttcaagaatattattggctctcttctccctgcagtagccttttctggtttcctggggtaatgctttaactctataagtctcctggtgcattcttctctacaacctgattctcaccctctctttacttatgtctcttgatgggttccagacatacctttttggatgagtcacaactcccttaatacataaaaaagtcattcttccttggtctttcttttcttttcatttttaaactttattttgaagctttttaaaaaataatttcgattttattttagatttaggtggaacatgtgcaggttcacattggcatatcgtatgatgctgagttttggggtgtgattgatcctgtcacccaagtagtgagcatagtacccaataggtagtttttcagtcctttcccctttcccctcttttggagtcctcagcatctattgttcctatctttttatgtgtacccaatgtttagcttctacttacaagtgagaacttgtggtatttggttttctgttcttgcattagttcacttagaataatgacctccatctgcatccatgttgctgcaaaggacatgatttcattcttttagttggcgtatatgtgtatacgtatggcgtatatggtgtatatgtaccgcattttctttatccagttcactgttgatgggcacctaggttgattccatgtctttgctgattgtgaatagtgctgagataaacataggcatgcatgtgtctttttggtagaacaatgtattttcctttgggtgtatacccagttatgggtttgctgggttggatggtatttctgagttctttgagaaatctccaaactgctttccactgtggctgaactaatttacatttctaccgacagtgtataagtgtcctcttttctccacagcctcttcagcatctattatttttttgactttttattaatagccattctgactggtgtgaagtggtatctcattgtggttttgatttgcatttctctgatattagtgatatagagcattgtttcatgtttgttgactactcgtatatcttcttttgagaaatgtctgttcatgtcctttgcccacctttttaattgggttatttgctttttgcttgttgatttaagttatttatagattctggatgttagacctttgtcagatgcatagtttatgaatattttctcttatcttttagagtgtttactcattgagtgtttctttggtcatgcagaagctttttagtttaattaggtcccatttaacaatttgtatttttgttgtgattgctttcgaggtcttagccataactttttttttgtttttttgtttgtttgtttttgttttttttttttttttttttgccaatgctgaagtctagaatggtatttcctagattttcttctaggatttttatagtttgagatgttatgtttaaatatttgatccatcttgagttattttttgtatatgttgaaaggtgtgggtccagttttgctcttctgcataggactattttgaagcttttaaaagaaatccttcctcatattcaagtgattactatatctgtttcttatataattgtaattttcctgtattgaatcatcattctcagtaaactatcgcaagaacaaaaaaccaaacaccgcatattctcactcataggtgggaattgaacaatgagatcacatggacacatgaaggggaatatcacactctggggactgtggtggggtggggggaggggggagggatagcattgggagatatacctaaggctagatgacgagttagtgggtgcagcgcaccagcatggcacatgtatacatatgtaactaacctgcacaatgtgcacatgtaccctaaaacttaaagtataataaaaataaaaaaataaaaaaaataaaaaacattttccaaacttttaatttttatataatttgaaccttacagaaaagttgcaagaatagtacggtatcagcattctttacccagattcacagttgtttatattttatctaatctgctttattttttccttctcctttacacacatacatgcgtgagcgcacacacacagatgttttttccaaaccattagaaaataaattaaagacatatggttttttactcctaaatattttgatgtatatttactaagaataaggacaatctcttacataatcaccatacagttttttaaaatgaggaaatttataattgaaacagcattttttctaatccacatattcatttccccccagttgttccaataatggtctttgtagcaattattttcccaattcaagatcaggcattgcgtttaattgttattttctttagtctcctttaagctgcaacagctcttcaatctttctttgctttatttaccctgatatttctgaagagcatgggctaggtattttgtaaaacgtcactcaattcaagtttgtctaatgtttcctgatgattttattcagcttttgcatgttttcctcactgtttagttgttattgttccttttgtattaataactaatttgtggagaaatatgttgatattctttaaatatcttattcattaaatgttcacctgctagttttagaatccactgatgatttttcaaccccattattccttctgcattttttatgtggcattctactgtaaggaaaagcttttctttctcccctgtttacttgtttattacatcagtgtggagtcatggatgcctatttgatgagttcaaaacttaccatcactatctgtccccgatttggccactgggagccctcttaagctggcttcttctatatattctcatcattttttagcacttgcagcaagatactccaggctcattttgtgttttctttaatccaatgcttggaattaggtatttcttccaggagcactgtttcctatttaatgggagatggtacttagcaacaaatctggagctaggaaattacatatatttatcatattcatatgtacacaaaacatagctatatatcttgtctgtctctctatgtatcaagctgtcagtatactgacactgacattcctgaatctaattccaagccatagagtatatgccagtcctttttctatttatgactccttttttccaccagtgagaaacccgattttcactgtacttcagtatatttactcatttactgaagcgtggaacacacagagtagtttcagaattacttactcataccgctgtataaggccaaaatgaaaacctggaattcaaaattagtttacagattcttaaggaaaagtttacaggaagtacaattcacatatcttaagtctaaaaattaatgagttttgaaaatgcatacatgtgggtaatctgtgcatcccccaccccaccaacaagatatagaatatttccatcaccacataaaaaggttcctgcagtacctacccaataagtccctcccccaactcaggaaactgctgagcactattctgattttttcatcatggattagtcttacctatattagaattttaggtaaacgatgactattgttttaatagttagccttaaattcaggagctgttagtcttccagctttgtttgctttatctaaattgtttggctagtctaaatcctttgggcttccctacaaaaaaaaaaattaaaggcaatttggcttctccaaaagtttgcagggatcaaaatttcattgaatctatagactaattttgtgagaactgacatcttagtaaagtagagtcttccaacccataattatagtacatttctccatttatttagatctttaatctcttagcaacatttggcttctatcagtgtggtggtcttagaagtcatttgttgctgttactcatattttattttttgatgctattgtaaatagcattatttgtttaagaatttcaaatgtttgttgttaatgtgcaggtattcaattgactttgtatgttcacattgtattctgtaatcttgctatattacttaaatagttctagccattattttgtatattcatgattttctaggttaaaaatataaaatatatgatctatagagaacattttacttattcctttccaaatgatttgcctgcctgcctttttcttcttccccaccactgccctggaattattgcagtgactagaacctccagtgcaatgttgaacagaagtagtgaaagtagactttattgtctttttcttagggaaaaaatatttcatgtttcatcattaagtacaatgttagctgtgcttttcatagatgctctttatctcatttgaggtttcattctattctttgttggaaggttttttttttatcatgaatggttttgatttaaaaaatagtttatttgcatttgttgacataatcctggtgtttctcttttatcttttaatatattgagttacacagattgattttcaaatattaaaccaacttagacccctaaggtaaatctcacatggtcacctttttattactttttttatatattggtggatttcatttgcctatattttgctaaagagttttgtgtctgtgtccaagagagatgttttctctgtaaattaaaaaaaatttttgttttgtataaaggtaattttttgttcacaaagtgagttggaagtcttttctattttctgaaagggtgtaagtttggcatcattttttttttctttaatgttttctagaacatcagtacagccttataagctaggagttttctttgggaagaagtttttaatcgtgaatttagtttctgttaaaaaaatataaagccattccaattttctatgtcattttgtgtaatttctgaaagtgtagctttcagaggattttttaatttattgaacttattggcacaaagttatccttttaatatttctttaatctgtagtgatatcccctctttcattcctgttatttgtaatttgtgtttttctctatttctaaatctggttttctacatatttagcaatattattaatcttttagatacaatttttggctttgttaatttctctatcatttatttcttctgtttcatcaatttctttggtatttgattccttctactttggatttactttgtccatcttttcctagcttcttaaggtgaaactaggatgattgatttgaggcagctcttctaaagtaaacatttaaagccatatcggccttagctgcttttagatgctctgctttcagagtcccacaaattttggtatgctgtgttcttgtattcattcagccccaaatatattctaaattactttgtgatttcctcttaatcctctttactatttagcaatatattgttttatttttgaattttgaggttttcttaatatcttatgatttatttccagtttaattctgctttagtcagagaacacagtctataagattttagcctttcgaaatctattggtttggtagttctcaatagctcagcaagtacgtttgaaaagaatatcttttgtagttttggtatattctaccctataaatatcaatggccaggtgatttttatagtgttttcagatatactatttatattcttgctgagctttttaatctaggttttttaagtgagatattgttattattgtagatttgtctatttttcctgtatttctgtcaggttctgctttgtatattttagagaaaattatcaccattgccatcatttatgttgcagattctctgtacgtaatatgtctttaattttttggctgatttcaagattatttgtctttgttttcagcagttttactatgatgtgcctaggtataactttatatttttctgctttgaaattgctgagcttcctggatttgtaagtttgcctttttaatcaaatttgtaaattttggggccattttttcttccaagatatttttcttctgcattctgtcttttttctctttttggaactccagttcatggaatttaaaccagtttgtattgccctagatataaataagatgctgttcaatgttttcaatctttttttctatgctcttcaaatcgaatacttgcttttgctttattttcaaattaattattatttttcttctgctctctcaaatctgctattaagcccattcagtgaactttttgtcagtttagatattacacttatcagttctgtttgtacatttggttctttttttatagtttttgtttgtatgccaggattccccttcccctcatttattatgaccatattttctttgaaaatggctgctttaaaatccttgtcactaattccagcgtggatcatcttgggccggtttttattgactacttttctctagactaggattcactttttcttaatttcattgtctagtaatttcttattgtatactgaacactgaggatgatatgatatgttgcagactctggattctgttacctgctgaagagctgtactttgttctagtaaacagttaacctggttagattcatattctgtctccttgcagttggcagcatctgaggtctttgctcagctctgtcagacattcagcagccaccttctgtcattctgtggggtctgccccatgaatgtgtaattcaaggatcaaacaaggatgctggtaaaccgtggcaacctcagtttcatcctctgactcctcaagcccatatcaccagtgcattgtacttgagtttcagctgccagtgctaccagaatagggaattgcctccagctgagcagctacatgaaggcaaatctcatccaatgctattggctcctttcttacaggagggtttactcttctctcatttctacctcttttattgctctcaagagcctttaaatcactatgttttatatgtttttcaaggggttataattattatctgcaggagaattagtctaataaccattgcttctccattactggtagcagaactttctctgatatatttcataattgctaaattataacccctatctaacttataaaaacattcatctacatgtttaatatggtgtattctctagatttttgtatgcctctagtgtgttttcagaggaagaaatatagtgcaaagtcacacacacattttaaaataatacaaatagtctgttgtgttatgaattgaaaacttagtattttttagtgccgggcactatgctatgtgatttacacgtgttgtcttatttaaaaccataaaataacataattaggatcatacagaaccaatttttagagaacttacaaaggtcacacagctagtaagttcgggatcagaatttagtactacatctcttattctcttaagtacacataatttgtctctgagctgaaatggtcaaagattttttaatataaaaattatttttaaagtatgggagtatgttattttgtactacatctcttattctcttaagtacacatagtttgtctctgagctgaaatggtcaaagattttttaatataaaaatgtttatgtactgtgcttatataatgtgattggaagtctcctgtagagaaaaaggtgtttaatattttaaaaagagcaacataataactgacggagtgagtcccagaggtgacgggagagaatgaagttaagtgctgaaggaaagtccaacactgagcagatggaaacctttcccccttagattgaagggaaggaaatatagattggtgttgctatgaaaaagcttaaaggaggagataggatgaagaggggaagtgagtgagtttgaatgtttttgataaaggagtctgtaaagagagactaagtcagttgagtggtcactgggtgaagatttggggaaaggtagaggtttgaaatatcccctgtagtaaatggcagaggaagctaaataaagttaggtagagtgattgatgattgggagtcagagtttgagtttagagccatgtgtttataggtatatcaattgtgaggtttcctctgtgctctgctctctgcggtaaacttttattaagacatgtattagtttgagataggatttacaaagcacaagtgatggaggacaaagatagaaaagaattacagatgcttttataatagtatagttttctctataaatatttgagattagctgaattgctctccacttggaactccttctcaatttgattctgaaagatgatgatccatagtgcagaattactgtggacaagatgtgagatacagtgagaaaaacctgagacaggtagaaccctgagtgattgccatgactgacactcattagctggatgacattaggaaaaacactaatatggcctctagttattgttttgtaaaaatgaaggtagctcttaaaattctctaccttcagaggcaaatgatgaaatttgtattttaatagcggaaaactggcctagtttatgtttttcttacattgctgtaagaatttttttttgttggggttagtataaaatacgatttaaattttcttaatagttctaactttgcatatgccttctaataccagtctgttatttggtgcatctcagaagagttcaatgtgttttagttaataatatgtcaaatttgtgcaaggctcccacgtgaataagatatacatataaaaacagtaggccgggcgcggtcgtcacgcctgtaatcccagcactttgggaggccgaggcgggtggatcatgaggtcaggagatcgagaccatcctggctaacaaggtgaaaccccgtctctactaaaaatacaaaaaaaattagccgggcgcggtggcgggcgcctgtagtaccagctactcgggaggctgaggcaggagaatggcgtgaacccgggaagcggagcttgcagtgagccgagattgcgccactgcagtccgcagtcccgcctgggcgacagagcgagactccgtctcaaaaaaaaaaaaaaaaaaaaaaaaaaaagatatacatataaaaacagtatatgacaacactattgttccccagtcttacctaatctacttatgaattactcccaaaattttatccagtagaataaagtatatatgtaattaagcttgaggaataatctatattcctgattatctatttatgggacacatcccaatgctatttagcaattgtttgtcaaagcaggaagcatcccagagtaaagaaacactatctctcaccattagttgtatagcaagccattttctccttttggtcccatgactgactgtgaggggaaaggagtcgtggatttttgtaacagggtaagaaacaggaacatcgtcaggacttacagatcatgagagtatcttcctttgttattgatgacaaaaatttgactcaaataagtagtgactctcttgggaggatatttgtgtttaacatctacaggagaaaacaagtcctatccacatctttataatcaggtagatgtactttaacctttaggaaccataaggcccattatggaccgccagtggaacatttcactagttggggaagtgaggcatgtaggccaacctggcttctgtatcccagcttggggtgagtcctttgtccttcatgagcccctcatgacagatgcttccctagacagaagtgagaaatttgcagtaacatgttagactagtgccactgtgaggctgcccacttagccagaaagcccatcagtaacggaagttgattgttatcagtggaactatgttaatttcagctcattcattcaatatacaatttattaagcaccactgtgtgccagccactgttctaggtcttaaggacacagtccctgccctcagtaaagtcatacttggggtgagggggggtgcaggcaggtagtgaacaaaggttgataaacacaagggtgggagtttatcaactgttatttcccacagggtggtgagggaaggcctcattgtaaaggtgacagctgagcagaagtctggaagaaatgaacaagccaacctcttgtgctattgggagcttttgtgtatattagaaagccccatctggagaaagaaaggctttgaaagctccctgtctaggctgatcagttagaaaaatgatttcactctggaaagcaccaatcctaagggcctatggcttggtgaacagacagtgcctttctgtgaaggaaaaggcacccctgtcttcatgcctgggcaggcagctgggtgagtagggaaatccaaggaagggagagagggctggaattttgctcctactcaccctcccacaggtcactcttgtgccatgcgcacatggcttactgcaggagcgctacgggaaggtgtgtggtgggaatcccatgcagagagaacagcaaggacaaagaccccgaggcaggaccatgtttaggaaactccgggcatccagcgaagctaagggagtaagcaggatcaaagtaggagacaaggtcaggctccaggttcactgacaccaaatgtagttctaataagatcgttctttagctctttagagttttcaaagaactttctttcatatataattttatatgatttccacaacaactcatcataggaagctcaaagatgttacattactgagataggtaatacaattagcaaacatgggggcttagaatttaactgaagtcctcggttttcagtacttttcatgatactttacctcagagattaataattttaaagcattaaaccttttttaaaaatatcaccaattccatcacagagctgtgtttttacaaaaatagacctttctgatccctgtgctgtgatttaaagcatctggttattgttctctttttctgtagttaacttcaatagactttaaaaattctctattgttgtaatttagatgtctttataaagccatttacgtctattttctcattttaatgtgtctttaaaatatttcttatcacaacactttttgaaaatgtggcgtttttgctaacccgagttatgtaattgttagaaaattaataaaaatctcacaaaaagcatttccttggtgaaaagaaaattctgtatattaatcagggttttcctgtgaatttctttcagctggaaatggagaagcttcagctacaagcccttgagcaagagcacaagaagctggctgcccgccttgaggaagagcgtggcaagaacaagcaggtggtcctgatgctggtcaaagagtgcaagcagctctcaggcaaagtcatagaggaggcccagaagctcgaagacgtaatggccaaactggaagaggaaaagaaaaagacgaatgaattagaagaggaactctccgctgagaaacgaagaagcacagaaatggaagctcagatggaaaaacaactctctgagtttgacactgagcgggaacagcttcgtgccaagctgaaccgggaagaagcacacaccactgacctcaaagaggagatagacaagatgaggaaaatgattgagcaactgaaaaggggaagtgacagcaaaccaagcctctctcttccacggaagacaaaagataggcgtttggtttccatatctgtgggaacagaaggaactgtgacaaggtctgttgcatgccagacagacctagtgacagaaaatgctgaccacatgaaaaagttgcctttaaccatgcctgtaaaaccttccacagggagtcccctagtttctgcaaatgcaaaagggagcgtgtgcaccagtgccaccatggccagaccaggtattgacaggcaggcttcctatggtgacttgattggcgcttctgtacccgctttcccacctccaagtgcaaacaaaattgaggaaaatggaccaagcactggctcaacaccagatccaaccagtagcacacccccacttcccagtaacgctgcccctcccaccgctcaaacaccaggcatagctcctcagaactcgcaagctccacctatgcacagtttacattcaccatgtgccaacacctctttgcatccaggtctaaacccacgaatccaagcagctagatttagatttcagggcaatgctaacgacccagaccaaaatggaaatactacccaaagtcctccgtcaagagatgtctcgcctacaagtcgtgacaacctagtggccaaacaactagctcggaatactgtgacccaagcactgtcaagatttacaagccctcaagcaggtgctccctcaaggcctggagtgcccccaacaggggatgttggcacccaccctccagttggtcggaccagtttaaagactcatggtgtagcacgagttgacagaggaaatcctcctcctatccctccaaaaaagccagggctctcccaaactccttctccaccacacccccaactcaaggttattatagacagcagcagggcctcgaacacaggggccaaagttgataacaaaactgtggcttcgactccttccagtttgccacaagggaacagggtgatcaatgaggagaaccttcctaagtcatcctcccctcagctgccaccaaaaccatccatagatttaactgtggcacctgcaggctgtgccgtttcagccctggccacgtctcaggtgggtgcctggcctgctgcaacccccggactgaaccaacctgcatgttcagacagttcccttgtcattcctaccaccattgccttttgctcttccataaaccccgttagtgcctcatcctgtagaccaggtgcctcagacagcctcctggtaacagcatcaggtaaagggattgaaatgttatacgctttttaaagaatatggcctctcttctcacttgccttgattttcttcacattgccttgaaactttttttttaaatttgatgcttccccccacccccatttcttttctttctctctctttttttgtattttttttaaaggctccagggtatggtgattcatcttgctatatgaattgcggtttcgctatgctaagtgctttcttcatttaagataacctgaaagtagtggcttaaagcacatggagaccattaatttagagagactaaaatatttacatgggagaaaagagtattccttcttattaaatatttatctcgcaagacctcagtgggtcatgatcagacagtacgtgttcaattctgttccttctgagatgacatttttaaagacctttcaagtaattattaacactatgttggattaccaaattgactagatttgttccgtaattggtatattttaagttctaatatcagtttggtgttttcggttttttttttttttaccttcagaaatggagtgtgaatatttataaatctgttctaagtttagtttatttcaaaagccatgtaccctatttagtgctgccatcttccaacactcgggcacagatggttaacatagcatgtgggctatgtcacagaaggtttccactgcaggtgtggcttatgaagtcactgaatctgggactcttgaacaaagaagaggtggatttttcccttttgttatacagtgctagagaaagcattgctttttactgacatgactggattagttatttactaagcaaatgtggctctaaagtaatgttaccaaaaatacataattgtaaatggcagagactggattccaaacacatctgactaactgcaaagtccatgctgttttcaattcccaattttacccctcaaaatgtggatgacaaagttctgttgacactttgaagaagtctctcctaccatgggatcttagtggttggtggagattgttggttcaaatgggagagaacttttataattacaggaaggtttgaacagttgttatatttaatactttgaggggagagagagaaaagcaaatagcatcatatttgctaattatcaggtgatgacagcagtacactaggatttatttgtccaattataagctatcaacttgaaattaaggtctttgagaggctttatccatattttgaggggcgaaatagggaattggaagcagcatggacttggaagttagatctatgttgaaatctagtctctgccatttacaattgtgcatttttggtgacttcttttgctactcatatgggggagggtggctgttaggaggattggatcctataacctgtcagcttggtattgagcttagaatagcatgagtaatcaataaatagaggtgatattactgcttcaatgatattgttgcttacagtatttttgagaatttgctatggaattgactttagtattattttgagatgtctttacaggcattcagcattctatatttttgatccaaaatggtattactgagttgaacagcttttctcgtggcctaaaataattttggctgtttcttacaaattaaatccaccctcagagaggaattttgctactcaggagaatagagaatgtactataagatctttgggcagtcacaaaacacaagttccagaaatgtgtggagcagtggcagtgctattgccataaatgcatagactgtaaagtagaaaacacttcctaggatatagaagttttgtcacttaaaaaaaatacaaagccatctttactttgagaccttgaggctttgccacttgttgccttagtcattactgtggtcctgggtttagctgcatgtgccctttggtttcggcagagaagctttaaaaccaggatctatgactgaggaacattttgtcaacaggattgaaaagttaacggattaaaatctgttaacttttaaagacagagatttactaatctattatctattcaccaggatatcctgccctaggattcagtaaaattttacataaaagagctataactcctctgaaaaatgcccttcacttatgtctggagagcaaaagacaatatagaccagaaaccaaaaaaaataccagcgactgaagatacggaaatcggattccttattttctactctctgacttttgcaattttaccaaagtattttatttatttattcctctcagaacttctgaattacttttggtagaataaccagtttctatgtcatttgcttagaagatgtggcttattaagggagaacggaggcactggaggccttgagtcattcagcaagtgtttactgagcacctagactgggaaatggaagtgtgattacacttacacaatgggggtgtacgactctacaactcaagtataaatgtagttcagctgatctttccaaataagatagaggatttcaactctgttttgcatttagattgcccctattttcgccactgtgaccattgcaactaagaaacaccagagctgcctccaccctgcttactaacctgtctgtgcctggttgagcttgtgcctctccaggtcatgagccctttgaaggggattaaccttccaaacagccactgattccattgtgattgcccaaagcaaggcacagggacaacacacatctgtcaaatacctggcaggtgtctcttccaatttcagtgatcaaacaagcactgaactaagtatagtaaggcaggattagtccatttctgcccctttctaagtatcaccctagagagctaattccctctgagccattagctttttcatttaaaaacaaaagcattgctggctgcagtaatcatacctgtaatccaagcacattgggaggccgaggcaggaggatcacttgtgcccaggcgttcaagaccagccggggcaaaatggcaaaatcccatctttacaaaaaatataaaaattagctgggcatggtagtgtgtgcctgtggtcccagctactcaggaggctgaagtgggaagatcacttgaattcgggaagtcaaggctacagtgagccataatcatgccactgtgcaccagcctgggtgacacggtgagaccatgtctcaaaacattaaaccaaaattatataataatattcccgaacaaaaaaagatttaaacttgcatgataaattttcaaactacctctccctccttggagaactactggcccatgatctttccaactctagaatcctgtgtttccatgtaagcttttatctataaaaattatgactaagttagagccccaaggaaaattggaatgacagaagttagccttttaatgaattgtagtataaattacccaaactctatttggcaacctttatagccaaatgttaaattttttaataacattcttaattctaaatgaactagaatttcttgttcctcctgaacttgccaaatagacacatttcaaatgttagatgaacagaagcctaaaccagaaatcactccaggcaactgagtttccatacccttggaaattgttttttctgttttttctttttttatttgatacatttgatttaatttggtttacaccttttccctattgaaacatatcttttaaaaattatcctccatgtatgattggcttaaaggctaaatcagaaaacaagaatgatctgggctatgacattaaccttctccaccctctgaagctgatgccagaagctgttctcactccttccctctgccattgcatgtccagtcattcccttcctcctggcatgttgtgcaggatgctcaccttactaatgtttgcgtatgacactgcaaaactgattgaccttttgctaacatcattagagtagctgtatgaataccggtctgttctgtcttaaccactatttaacctcttaactaagtattaccatttttatgattgtcgggaatttcagatgaacagtatagtctcatgatgaagtcctatttttcccatatttaggcaggatttattaaaataagcttgtctatgctagacaacattggaaatgttagtgaagatataaaacatatttacagttttaaaatacttggtatttataaagcatttttcttttgtaaagattttaaaaatatattgcagacctctaaaaaaataaggcaactgatatatcttctgtagttctgtgtaagaaaacccttgagtggtctaaagattgaaaacaaattgaaaaaaaaatttgtctttcggataacttattaaaaatagggtttcccaggaaattacagctgcaattgaatatttccatataaggcagttgaaaaatatatttaaactgtctcctcccctcaaaagcctagatttatggtgaaaaaagaaaaatgtaaacaaaacccaaaagaatagcaaaccatttacatatattggtattcataaaagaatatcaacaaccaagaccccttggatgagatctaaagagagaatgaaagagaggctgagtatgagccccattccctcctgttccacagaggactgtagtgcgatgccttcatattgcctgtgtttgctttgcagtcgaggttttatgccttcgtgtttataatttctctgtttatgcatttctaataagtactgatttaatttttgtgggcctgttttttgtttgtttgtttgtttttaagaaaatacaaaaggtaaaatgtaccagagaggagccttcttgtaagtatgaagtaaaaatactacttttgtaagaagagctaatgagtatcagtaggaaaatatcataaagtttagataaatattgaattttatgagcattttaattttgtatgtcactacatgtagtcctaatagggttaaaaacaataaattattcatagacccaaataattgattataaagatataatatccagctttttattagcagtgtagtttcatttgtataattggctttgttttgcctttttaataaagaattttttaaatactaagttcctttgatatgtacttttaaaatgctaagataatttagggcaagtaatttaggatttaatcataagaattgagtattacatatgtattaatatgactctcatatgcttagaataattatgctgataccaatgtacagagagtataaaacatccatctgttgtatcttactaaagggatattaccacatatcgtaatcaggtggccattctgccttgtattccactgctaagaaaggacatgcaggtaaatatggcaagatcttatctcatcatgccacacacatgcaaaaggatgtaaagtcaaaagcccatgtgaccattgttatgagcagaaggttcaatatggttttaattttcttttacaggtggtagtggatagttacaaaacattttaaaaatccaaatggtatagttccttaacataaaattttactgcagctagtaaaaagtaatctttgttttatgcacaatgagatgtattgtgcatatagaaattcagggtctagtcattgtgaaacactatttagaataaagccctccatctgtaatcactttggtcaggacaaaatagtcttaattggtctgtgaaagtgtgcccttagggatgaatatatgtacatatgcacaacaatgttacaggtattagaaccctataaggaaaaagcggaaaatgtcttattttgaaaattcactgtatttaagtctaaaatacacaaatatctatatgtcacattgaatgaacattttttactttactgtttttacagccttttgatcaaggaagaattcagaaaatttttcatgctatatgcagccgatttcacacacttaacagactctcttctaaagctgctaaatactgatgagaaatatctaactataactcattgtttttgttaaaattatatagttgagtgtcctgttttgttggctgattaaaagtttgttaggcattttgtaaaggtggccagatgatacagtcttcacaattgtatattgaatatttgtgctggtgaactctagatccagttatatatgttatattttattatctcttaatactgaatagcagttggcctccattatttctattcccaaataagggaattcaaggaatataaatagactctttggtccatcttaatggtttacataaaatttgtaattaaacattttagaaaccttgttgaaaaagaaaaatctgttacaattattcctcttatacctaaaaatatcagtttacttttccagattaatattgaattagaggaaaactttaccttgtaaaacctttacattttaaaattcaaattgttttaaaatcctgaagagaaatttgaacttttaaaatgagacagccatcttaagttttcctaaaaccagtcaccactttaacacttacctgtgcaagactcatgactaaaaataattttttaccatgtatgttgatttaattagcagcagatgtaagatctgaaataacagtccagattcatgctaagtaaatattaacagattgataatgttagaaaccacataatcctctagggacacatgttcatatgtttgtgtgtgtgtaattcagaaaggaatgggtaatatctgtctcttgtccttgctcctactctctaacgagggtcactttaacctacaggctggtcaccctccctaacccctttgctaatgagtggtggtcctgcccccctggctggcaggcccacccttcttcagcaagctgctgcccagggaaatgtcactttattatcaatgctgcttaatgaagaaggactggacattaattactcctgtgaagatggccattctgccttgtattctgctgctaagaatggacatacaggtaaatatggcgagatcttataccacacacttgcaaaaggatggaaagtcaaaagcccatgtatcaattgtaatgagcagaaagttcaatttagttttatttttcttttacaggtggtaatggatagtttttttaaacatgagatttaaagtttttataaacatttaaaaaatccaaattgtacagttcattaatgtaaagttttaccagagctagtaaaaagtaatctttgttttatgcaaagattagtttgcatttatggtctgttagaaatacctgatatatgagaaagtctaattatcagaactttagtgctacatgctacagtgagggaaagttttagcagttaggtaaggtcatgggcctgaaattgttccacagttggaacaatttatagttatttgaatgtcttaaaagaaccgagaagttgtgtaactataaatggtatatcgatgaagactgggaattattcttgttctttaaaatgcaaatcctgtagtcaaatataccaaaacatatgggagtgcagaaaaagagaggacttgaccgcaaatgcaaagtcagatagcgttgcatatggaagcccatatgattgtcgattaattcagataaatggaggattctagtgacctcagagatcccgttatttttaaagtattctagaattcttcataatcaccatggagattttctttaatatagaagaagtaaatctagtaagtaacatcaggaatgtgacatctaggtgatatttattcctgagttaggtgactttcgatgggctgtcctttagcctcattcatggagttaagtgtaggatgcccaccatccaaaagcagtttaaagattaaattaaacatcataaagtaataatttatttaagtacaaagaatggtatttccgtttggtaaatgaatttgattctccatccaggaacattattttctgggatagactgttggaaagatctggtaaagcattttctggcacatgacatttttttttactcagcagcaactcttcccaaaatgcacacacgcatgggcacatgcgcatgcacacacacacacgcatcttagtgaatctggggtattataatctttgggaaaattggctgcttttcctgtaaaatagtctacagagtctcaggtctgccatgatggaattctgagatgaactgtgcaggggagagtccctttgggattagaatctatctacagcttgtatagaatttggcacatcataactccaaatggggaatttacatggctttctattaaaatccatagactgtgtgagattgctgctgagtgcagaagcccaagtcaatgctgctgataaaaatggcttcacacccttgtgtgctgcagctgctcagggacatttcgagtaagttgctcttaattctttttttcccaccatcaaaggagcctctttttataatttgcacacgtattttagttccggctgaatgtgtaaactagtgcttaaaatcactggcaaataaattcactaaatatatttgaggatttaaatgcaaactaggattctaaatttgctcttaataatagttaatgtttgagggaagtgaagaagagaactgggctgtgtcccaactgaacgtgaatgaactttctttggaagatcatctatggcatatcaacacatatgtcatgagatgaaggactgttgagaagtttgtttttcactgttttacaccattccaaccccctaaaagattttttacttatgatgtcactaaaagtagaacatagaattatattggttgtaataatctaaatttcctagtggtaatgtattctaattattcatcttgttttaccatttaaaacaaaatggaagcatgaattttacatactgaaagtagtttgggcattaagctaaagagaccctattaattaaaatatacctaactttagcaatgatttctttagtagcttactaagtcagttagatataggcatgactttttaacattaaaagtcatattttaacttaaaaaaatagaaaatagctaagttgctttctctgcctgtgctgaaatggcaggttgtgggaaacgcaagttgcttttaactttttaatctaactgtcccgataggaatgttctttaacaaattccagaattattgaaatatgggtttttaaggttgaccccatgttattaatcataaatataattttttaaaattcaaaatgaattatttatgtagagcatgattcacttttctgcatatctaccacatacctcattaccctgagtttgtcattgagaaccctagacactgattttgctgttactcttgggacatatcctgactccttcaaaaggaatttctcctgagctgtgctttttacctttactttcaccaggcaacctgtaggggcactttcttggacatatagcagtcacaggaatggaagcatggataactttgcaaacaggaaggaccctggagaaatctggggatggatttttttctttctttcttttagacggagtcttgctctgtcgccaggctggagtatagtggtgcaatctcagctcactgcaacctccgcctcctgggtctaagcgatacccctgcctcggcctcccgagtagctgggactacaggtgtacgccaccacacccagataattttttgtattttagtagagacgggtttcaccgtgttggccagaatggtctggatctcctgacttcgtcatctgtccccctcagcctcccaaagtgctgggattacatgtgtgagccaccgtgccaggctggatttgttaatttaaatgtgtctgatacacatgtatatcaacatgtcacttaatttaaaaaaaatgtataaatcagatactgcaagggaaaattaggaaaaacattcattggagtgaaaataaaagatgaagtggattgcttcttactttgattatgatttagccctcttttctaagtttattctcaactaattttacaacttaagctctacatgtttagctagtaaataagtgtcacaaagtcttgactttacctcatttctttcctccttgattctcaggacagtgagtttctgcttagctatcttttcctcatcaactagcctgacttcaggagacaggacaacctctgctgtcttttctccccaaggcaacccttttctcagcctttctgctgccttttatagagaaggcacatggtgccctgctgtctatgctatttataattattttctcaagtgaaaatctcagaatgactcagcagccttttttcagtgttcaaactatttcgaaccaaaataatatatatttatcaagtacagttaaaccgttcatcccagtaagttaaattctaaggactctactttcacaagttggttatagggaagtgtcataaagcaggtattagcacttttcaaaatttcctgggagaaattaaattttatgattagaatatattttctagccttgtgaaaaaaacagtagtcatgtaataagatccataataattgatatatgtaaatagaaacaattgatgtatataaagatgcaacattgctttcttttctgtatttaatatcttggttaggtggtgcttcaaaggtcaaacccaggttttatgtaattaatcctaatcttgtgtttaggtgtgtagaattattaatttcatatgatgctaacattaatcatgctgctgatggaggacagacacctctatacctggcctgtaaaaatggaaataaagaatgtattaaactcttgttggaagctggaaccaatcgaagtgtaaaaaccacagtgagtagcagtctgtttttttccccctgtatatataatttgcaatatatttgtaaactctataactagaaaaacaaaataaattaaaatagaggttgctttattttgttttgcttgtaggatttggaaagtgtctgacccttgtttgaatctctttcccgttaattaaatgtcttgttcattagcctagccagtcctttaacctctgagcctcagattaatctgtcaaacaggaaaacaaatacctatgctttgattatttttagaactagggcagacaagggaggtataattttttattcattcaacaaataatagtctcagatcctggattttcttaagtaaaggaggaccagtggttaataatataagcagagatgtggctgggcgtggtggctcacgcatgtaatcccagcactttgggaggctgagatgggcggatcacctgaggtcaggaattcaagaccagcctgatcaacatggagaaaccccgtctctactgaaaatagaaaattaacccagcgtggtggtgcatgcctgtaatcccagctactagggaggctgaggcaggagaatcgcttgaacctgggaggcagaggttgtggtgagctgagatggcgctgttgcactccagcctgggagaaaagagcaaaactctgcctcaaaaaatatatatacatatacatatgtattttatatatatatatatatgcagagatgtaataagctagatataaacatttttaatgactcattgctacagctttttttcttaaaaaaacttcctattttttgaaaatctgagaaaacagttttatatttttcatgttatttatatatattacttgagaaatctgtggtgttacacacattcagtataaaattctatagtgaaaaatgaattaattttgtatcacagggctgaatgaaaaataagtagtacagcataaaaattagtcacatcctaagttagagaacacagaaatccattctctccaactagttgctgatgagctgaacaaaacctttagaagtatagatgctcaaaactccagagataaacagtgtaattgggaacaattatgtcttgtgccttataataagaaagtatcaaaagaggatagaaaatagaaaattttttttccagaagtggttgcatggcctttgtaatataaattgggaaaggtcaaaagcacttacactcttcagtagtagactacttgtgtagtatactgttatactacccaagtaaaggtgtccacaacccagtgaagaacacgcctgaatggagctgattgaagctccatagtcttgtcttagccaagtggagtttatttacctgattggagcaccattgtcttgtcttagccaagtggattttattggtatgagataccaaaccagagaaaaagccacattataaagggacagctttagcaaatggtcagatgacttagcccaaatttagattgttcgtatttattgcctatttctctgtcttctaccctattattttttaaagtgtactgtagcttactgaaatatatttagtatagcaatgtgaaatactgcatgaaaaaggtatgtcaaggggaaattaaaggtagaaaaataaagccaaaatcaccaaatcaccaaaataaggccaggttcttttatgaaaaattttttaaaaaactaaacaagatgggtgcctgagtagaaggcagaccgatttctatataaagatgaagagactgtagatagaacctagatttttcccagaataacgcttgtcaaactttagtgtattagaatctcctggaggggtcgttaagtcagattggtagccccatccccagagtttctgattcagtagatctgagatgaggcttaagagtttacagttctataaagttcccaggtgatactgatgctgctggtctggggaccacacctgagaatcactgccctaaaaaggacttctattaatacctctactctagcaaccagctaagtgggtaatagaggctccaaaataatatattctagaaaacagacacaataattttagttgaaacattttctaagcttataatgatcagtatccctctgcagtcacaaaacactcaataggggcccataaaccttcactgaaattatttggctttgttttttctttatgtctaccttttccctattatttaggatctttgcttctggggtggttggcataaaattttaagatcacagagttaggtcagtgccttataagtaaaactggcttataactgcattctttcagtactctactaataacattattgcatataaattttttaatccctttaagctaaagttcattctctttcatagtattaaattgagattttgatttaccatacataatgctcagttatgccctggacagtacctgctcaccccaaatggttaactggtaggtagaaatgattacaaaatagcaaacatgagtcacagcagttggaaatattgttaactgacaggagtcagagaactttacccagctcatcagtgataatgttcaggattggaatgcctgcttttcccagctcagtggtccatgcccaagaacatttagaagtgaactttcaataatattttccttgacattaatgttgttatcaaccctttccccctggtcattttattttcaggatggctggacaccagttcacgcagctgtggacactggtaatgtggacagcctcaagcttcttatgtaccatagaataccagctcatggaaattctttcaatgaggaggagtccgagtcaagtgtctttgacttggatggaggagaagagagtcctgaaggcatatccaagcctgttgttcctgcagacctcattaaccacgccaacagagaaggctggactgctgcccacattgctgcttccaaaggttttaaggtgtgtctggtagcagctggcctcatcatgcagctgtaatttgatgagcagcaaagttgtctgctatagattaagtgcacttaaattgaataattggagactgagtgatacaattgcagatgttatttaccaatacaaattgacattattcctatgtagtagttacttatggtcaagggtataagagacttttaataaaaatcatttatttgtagtttgttaataagaaatatgagggcaatttcaaacattttatcttgtctactataggaacaaatcattggcattgatttagtccattgggttgcttacttcagtaccaacaccatgctgctagttagaggcagggtcaggattcacactcgtgctgcagagctcattctcttgccctgtaccctgagctgccaaacttatccctaactgtgctttcttaccgatatctaagagggagctctagatgcttagatagaatacacaaagattctgaatattaaagaaacagtataatatagtagtccattcactcatgttttcatgtttttctgatgttagtcgctttagcattaatatgtgttagcaataataagatattagaaagttcctgagtgcaaggcactgtgcgtgctaacatttgcaaggatcacttttgccattagctcctagttcaatggcaagtgagcagggtacaagacaaatgtaggataagaaaagcacacataaaaaaacacaaggacaacagaaatgcagttggaccagtacagaaatgcagcaattacgggaaaaagaaagagaacatacatatttcaaagggcagagctccaggaatgttaggctcaggcatggcccattctggaggaggtggaaattattttgagctttgcaaggaaagttaaattcaccattaccactgagaaaggagagtggttcaggtgaaaggagcattaaaaactaacacatggaagtagggaggtggataacaggtccctgttaattggggtaatggagagtagtgagaaataaggacctgactgggagtttcacagcagggcccagggccttcaatgacatagcaaggagtttggtcttaatttactagtcaaagtgaaaccattgaaaggttttgtacaaaggaacaaaataatcaactgaatagttttaaatagattcatttagcaacaacatcaagaagatttgagattatgaagaaattggtatcaggaagggatactacatgaaagatgatgacagcagtggaaataatgagaaatattaggaatgccccagaatgaacatggattagatgagggaaatgggggagctgaataaaaagataatagtgacattcccaaaaggaacaaggaaaagacatcattttgatcaagaagacagaatgcagttttagacatgctgaatgtaagggctacgatttgttcatccagaaggagatagctaaagatgtgtatttagagctcctggttgggtaacttcctgttatcgtgatcttagcagaagctgttcatcttggactttggtgttttacaaaatgagaaaagggcatgattcaattcagtctggaggtattgtttgttagcagtagttttgttgttttgtttccccaactttaccctttgacaaaagagataaaaaaattctgggaacttgatttgtttgtatgatttgaatggaatgcaataatatttgacataaaagtttttgggagacaaagatggaaaatgtaaatagtttaaacttgaatatgcacagttaatctaggactatgaatcttttgctgttgtagaggtgcatggaaagggtagtttgcaacctgcctccactcctttaaaagaaaaactctgaatgtaatatgagatgttgatgataggagtgcgttatacctgcactcagcctagaggcaaaaaaaaaaaaggaaaaacaaaacctgaacacccttgatctaggatgttcggctactgaacctctcaggctaggcagaaaggaacccactccccagggtgagttacccttcagtgtagggcaattgtgatgctgctcagctccttaactatgaatcttttattagttctggtgtttttatgatcaaacgtggcattgtcattgatttccacatggcattgtcattgatttccacacctctggcatattgtccaaggaaaatgtgacctctttctcccatagactatgactctcctgtgtttttttactttaagaagcacaagatgaattttggacaaggaaagagatttttttaagtgggcatgactgccaatattcacacactgctaggctattaatatattttttaagccctagagtggacatttaatcttctagtctaacctctccattttatgattaagacatttaaatcccagagggtttagtagataaaagttgggaatgaagcccagattgcctgagtccattagtcgtttcattgtaccatacttccttctcccctagtcaaagatattggaaaatatatttgtatcatttgcctaatatttatattctggctgagatagttcttcagaaagtaatccacttataactaagatattaaggccagatttctgaaaaaaatacggctctgagctagtcattgcattggtaaaaagattctacattgaccacaagtagagcttaaaaatatttttttttcttttctctagcatacatttgtctaatctacgcagggtagtagtatcgttgctacccaagaagatgacttcagtttccacgtggttttcagtagagaactgtggaatttcagagcttgaagggacataacatagctcagtggcccccaacctttttggcagcagggaccagtttcgtggaagacaatttttccatggttgggggtggggtgggtgggaatggtttcaggatgaaactgttccacctcataaggagcatgcaacctatatctcttgcatgtgtagttcacaataggggtcacactcctatgagagtctaatgccaccattgatctgacaggaggcagagctcagacaggaatgcttgcccaccctccactcacctcctcctgtgcggtctggttcctaacaggccatggactgatactggtctgtgaaccccgggggttcagggacccctgacatagttcatctagtcaatttcccttgtgttgtagataaagaaactaagtctttatctacaagaaatgggaaatgggtaactaattcctgaagatcaaattcccaaatctgtcctttttccacgttagcccctggtctttttttcaatggttaagaaatttgtgcagaccaccattaaatgtcatcggaaaacctctctctacagctggcctgactattccagagaggctgctgaactaaggataagcctttgtttccatcatttcatgtgaatagatacatgagtttcttaacgaaacttcctgttctgtcatgaaaccattgacatgttagtttcctgcaactgaaacaaatttaggagattgcctggatttgtgcagctctgttgttgaagttcatatacccagagatttttttcactggggggactgcatgaatttttgactacaggaggaggttatggttctcgcttatgtgttgccgaagccagtggcttcctgtcacttctgcttttgctttgtctccctgggtgttttaacaagttgacgatttaatgcatactcctctctccctgggcttccagaacactgcccttttctcacttcctctccaactttgctgaccaggctttctatttgtttttctgctttttgttttttggggtgtgtgtgtgtgtgtgtgtgtgtgtgtgtgtgtgtgtgtgtgtgtgtgtgtgtgtgtgttaactctaagcaactcccaagctttattctcagctgcctactcctattttctaagagcttatccagtctttcaggagtcaacagtggctcctgcagtaactagtcccaaacccatatctccatatttgcctttttacttgtcctccagacattcatctccagcatcctggaggtcatctctgggcagtcccactgtcctctgatcaggtggtagccctcttgttacccactttagatcatttttatgtgttaggattgcaatctgcctgatgcattgttagcttttagtcatatgagagtcagacgtttctactcacactgtagcagccaccttggtcctccaggaggtatccatgaggtatgtgcaaaggtccacatgacgccccaacacttggattccatcttcctaggaattggatgcaacaagaacaagataataggagtcactaaagttattcgttgtcgcatggagttgggtagctagttcagaagagagaacattagattaggtgcctgcaaaaggcacaaagtcattggaactagatttttatcatgataaatagaaatctgttctttgaactctattgtaatgcttttgattatctatgattatttcctttttttctattaatttttttaaaaaattgttctggaaaatgcctttttatactcattccctgtaatgttcagtgaagagtactgaatcctttcttactttggacagcagtgactggcagaaccctaaagggaatgtaaacttggctgcccagggtcgtgctccacctctcatccaagacatgggccatccagtgtttcccgccaacacctttcatggatctgggttttgatcctttttctcgtcactctgaactttctcacttgaatgatcttgttgatccgcagaatataatctatagggattctaaaatctcatctctagccctacttaagcattttctgagtctgtctaggcaggtgctttccttggtaaccaggggaacaaactttccagttttctcagtacaaccctgtttatgcctgtcatcccagtgtaattattaacagtgcctccttttactctctaatgtgttccagtttaaacagttatagggtaatcctgttggggaccacattcatttttgcttccaccagacagctcccttctagcacattcttggcccctaatgtttaggcttcttggccaatctgctgcaattcttgcttctcctctcttactccaacagcatcacctggcatttgtttacttgctccatcttcctaacttaaagaactcaaatgatcaacacaactctagatttactcttttacgaataaattttgaataccttgcctcctccatagtcttgtcagtgctgtcctaagggagccctcatcatctgctgtctggtcacattcacagtactgctgtggtctcatcatgttcggtctctctgcttccctttacattgccatgtgaggggcctttctaacaggtgaacatggtgatgtaattacctgcttcatgtcttcccaagcctctatcactgccagggcagggatgcctatcatgacggtcaagtcccttcctgatctggccttggtctgctcccctaggcacacttctgtctccttccttagtgcgtgttaggctttgaccacgtgtgaccggccaatgtgcaaacatcctgtgctctctcccctccctgctgctgccattacctcaaatggcctcttctcctgtcctgacccctctctgcctggaaaacatttcagcttgtcttggcttcttggagttaggtgttcccaggatacctctccacactttgcttagagagcatgtactttattgtaactgtttgcatgcttctctgcctctccatctcctctgaacagttactttttaatctttatatataccgtgtccagcagagtctgtggcccaaaagtactaaatgtttgctgagtcagtgagagaatggactactgtatttttcttaactggtctccttgctgtcactcttgtcctttccagcgtaatctttcagtacaataattgcttttcagaacagagctgaacatggcactttccttcccaaacacatcctcatgcctatggaaaagcatgcaaagtgcatagcactcagcccttcacagctggcagcagccaacttcatctttggccatgcacacctaactctaccttcttgctcatgtcgttatttcccacgttaacagcttccatctccccagccctgtaaagcagcacttacaccccaaggctgttctcagcacttgagctgggctttaaattttataattgcaaacttttttcattttctttccctctgctcaatctcaaactcttggctccctgctctgactttgatttttatctctagctctctggacttggggtttctactgaatttcctgggcactggtaccttgcttctcagctctgcctaaaggagcctggcacttccctcacccctcaacctctcctctgtccttggtccatagtaacggatccctctgtttcagctggacccatgggcacccagcataaagacagcattctccagtccccattgcagggaactatggccaaatacttgagttccggcaagtggaatgtgagtgcatgtgaaagctgaggcctaaactacttctttaaaaggtctctgttatagcagatgtctctatatcctaataggaatttagcttaaactcatccatctagatccctgtctccgtatcacttgggtaggacatcgtgcccagtttagggcccccgggactctatttccagaagcagggactgggatcacagcatttgtcctcttcacacaatcccattcaacaaggagagagtgtggatacttctctccctctttacctcctcctgctcctccataaagtaaaactgtactcattgcttcaccagccccttttctgagtgtatcaggacactttgcactcctccctgagacatggaacttctctaccttattcaccatcaggacccttagccctcataatagcccctggcccaaaggggctttgtgccttacttataaagttgctgtgagggctaaacgaacactgaatacttgcaaagtgtggaatgtgcctggaacttagtatgtgctcaaatagttgttgtagctgttgttgttaagtgtcagtggggccaaagttttcactttcattgagttccccatgcagccagcacacactgcagaatttactcttgtagtagtgtttggctatgtgctactctcctggggactgacattcatgcttccttaaagagaaagtcactgcttatgttctggcccactgacctacctgaatgtaataaaaattagaaataacctactttgacggccagaaataaaagactctcagttcaggagtattgcaaacttgtgttaccccttttatcatttctgtttgtaatctgaagtaataacacttaaattgtcttgagattagtgacatttgttatgtgctatagtacctcaccagttaactggatatttggactgttttctagctggtgatgatgatgttgattctagtaataataatagctactaataaatattgggagtttagtacaggccaagaatataagaactttgtgtgcatctttcatttaagtcacattacccttatgagatatagatacttgaaatacagatagagaaatgaaagcagggaaatgttaaatgattcagcaacagtggtagatagagtcattttggatggcaggattagaatccaggtctgttgtggctcttacctacatttactgcaagttctaacttgcaaaataaatgtgtgatttttatcatttatcatcttgagaattcactaagtttagtgctcagattgctttctatttaagtttctaattagagttcatttctaaatcaacattatcttattcatttactgattttgtccaaattagtaataacaaattgatatgaattgacatttatttatctgactttgcgttctgttaatttcttagcttagcaatttcttaaatctgaactgtagaccaatgaaagccagacttccagacttctctttaagatttacttttttaatggccacataataattgtacagattgccagacttaaatggcaagctttagagagatccctctaacctgaacagggccagccagggagaaacaaatgtcctagttgcttccctttgcaagcaggcagattttctttactcaggaaacccaaggcccagtttcctatccttccaccatccaagaaggttctgtctgtcagctttaccttcatagcagcactggcttcctgttaaagtttcactgaattggtggtttctgcttagttttttgtttttctttctggcccttagggactcactgtactttctagcaaactcattattgcatttaaaagtatgtttcagaggcaacatgaagcaactggaactcatgtatactccttgtggaagtacattttggtgtaggcacttttgaaagctctttgaagtatggactaacgtagaacatgttcatgctctgtgcacagcagtccagctctgctatatactgaacaccaaacgtgtacaccacaggacatgtactagaatgtttatagcagaacaccaatgttcatcaacaagagaatggataagtaaattgtggtataccataatggaatataatggaatcccacatagtaatcattttttaatgaagatgaattctgactactcccaacacatggatgaatcttagaggcattatgttgaatgaaagaagcaaaatataaaaatgcacctacatacagtatgattccatttatatagagttcacaaatagaccaaaccaatctctaatattagaaagcagatagtagttgcctctgcgggggatggaggagttaattgttgagatggagtacaaaaggggcttccgaagtgctccttccacaagtatgtgtgctttgtgataatgcttcaagttatacacttctatgtgaatattatatttctttctttctttctttctttttttttttttttttttgagacagagtcttgctttgtcacccaggctggaatgcagtggcatgatcttggctcactgcaacctccgcctcctaggttcaagcgattctcctgccttagcctccggggtagctgggattacaggcgcccaccacaatgtctggctaatttttgtatttttagtaggatggggttttaccatgttggccaggccaggctggtctggaactcctgacctcaagtgatccacctgccttggcctcccaaagtgctgggattacagacatgagccaccacacccagccagatatggtatttcttttaaaaatattttatattaggaaggaaataggtatattttaaaagtggatgtaagggtgtgctacagaaagataagaaaaggctatacaagatgacctggtttaatatgttgttagaactgcaagacagccccatgcctccaagtgggtgtgtgtgtgtgtgtgtgtgtgtgcatttacaggagtgatgggcagggcattgcttgttttggttattagttccttttcatgctttctggtctattcatttttctccttagccttgtgggaaattagccaacaaatcatcaagtggtaaacattgatacaggagagttccttggtaaatatcctcatgtaacatcttgccatgtgcttatttattagaaaatttatgtatatatattgtctcttactttgcatttgaaaaaatatggaggactaagacttttcagttcgtagttctactttttgaatggagatttccttaagcaacacagaagaagaaaaagctgaaaaggaaaggtagcataacttcaacatctatagggaatgtttttctaaaatctcaatcaacatgatatgcatatttttcaaataaaatatggcaaggtaacatctcaaatacaaatatgcttatgaggactcttagaattgttaaaattagagccctgcacttatattaccaggaaagccatttatagtctagaagacagcaaagtacatcccgttatagcaaaagtctttttgttttctattgccaaattaccataaaaggagaatgtctgctgaaattaattttgttcttaatttcaatctgcagactgagtgattaacaagctatttttttttcttgcaacctaagaagctgttctgtggaacaatgttatgatcctatcatttgcatttaaataagcactctttgttttgcatttctagacattgtttagtttaagattaatctgtatattggggttgatggaattgaaataagatttatagccatgaattcttgatgtgattgttataggcaactggcttttcctttgggttttgcattcaagttaattcatttggacttggaggtaatagagctcttgtctttatagaactgcctagaaatcttgtgtaggcacggagggcttgagccagaaaggagagacaagtgcaatcggactgtgcatgatgttgccactgatgactgcaagcatttgctggagaatctgagtgagtgatgttcagagcttattgtttatctttcccctatgctgctggggcctctggtacaatgggaaaaactatttacatcttttgcatgtcctttttaacctttttggagccctagctatggcaaaaatactgactgtaagtgtgataattaactatttttccgtgtagaatgactttttgtagaactaattgctattcaagtaatgctggtttctccttgtattttactgacctaggacagcaatctaaatatttattgcatttttcttctgacttagattgtctttctagatgttagactggcaggatatgaaaaatcccagctatgtactctgcatcagctgattgtatgaggcaggcaagttggttgtctcccagcacctggtcgcctacttttctatgaagataattgatcatcttttgggtcccttccagctccacgagtatatgctcctcagcattttataaaggctcacttgtgggtttatgagtgtggagtatagaccttacaaaacatcatgacctcttatattaagattatcacccaatccatccagtcagccagctgtatcagtaattcaattttaggataagcaacattttaaaaattgaaataatgtttttatcttcaacctaatacatacattcatatacttttattttgtgaagaaaatttcagaatggtaaggaagcatatatgcaaactgtgtaagtatactttaatataaaatataaaagagaataatagaaattctctttaaacccgagggggtttttttggttgacagaaggctttatttatcattgaagtctaggtttcgggtccttaaacttttgaatcgctgctcagtgtctgaaacagtgtcttatacagaatttctctaaaatagttctcttattacaagctgatgctaacctaagaacaaacatggaacactttctgttgagctaaaattttattatggaatgtaaatgctgtcatttaattatatttcactttctgatattaaacatttaaaagtagaaggaataaatatatatagctatggtatcttagatgtgaaaaatatgaagcatattggcatggctgggatagaggtgtgattagaggtggggaattggaaggatgagacagcgcaattgatgttttgggcagtttaatgctcatttcagtagttttgaccttacattggcagtcaaagataagccaatgagattgttgatagtgcataatgtggtacaaatggtgttttggaattctgtaggcagctctttctgggacaaatcaacctatagagagtctggaaacagatcaagcatcaaaaagttttaatgatgtgtcctcagttggaccagggtggaggagagggaaatggtatataatgagagggatgggaaatcctaaaattgaggattaaggaggactttatgaaataaagactgatatgggagacctgagtataatttctatctcagacatgttggcaggatttgcagatgtacatcctgtggaagactggacattaggtagtgtgatttaagggaaagggcatctgaatcccagtatccagatgtctgtgtaatgttagacaaggtgcttagccttctctcacctcagtctgctcacctgttaatagggttagtaattattcgtatacctgagtgcaaaagagtggatcatttcttaaggtctttctaagattccaattctgacaatctgagagaagtaaaaaagacaggatatgcatttagattatgattacttccataaggcttatgataaaagctgcgaatgcaaatgaactatagaaagtaagtggggccaggtgtggtggctcacgtctgtaatcccagcactttgggaggctgaggtgggcagatcacctgaggtcgggagttcgagaccagcctgaccaacatagagaaaccccgtctctactaaagaatacaaaattatctgggcgtggtggcatatgcctgtaattccagctgctcaggaggctgaggcaggagaatcgtttgaacccgggaggcagaggttgcagtgagccaagatggcgccactgcactccagcctgggtgacagagtgagactctatctcaaaaaaacaaaacaaaacaaaaaaaacctgaagaacagaatatgtcaaagaagaacaaagatgcacaattattttcatttattcaacaaactactcctcgcctaagcacatagctagaagtactcttgcatgtgtgtatcaggagacatatgaaaatgtgtgttgcagcattgtgtgtaatactagaaaactgaaagcactctaaatggaaatctattaggaaatggataaatagaataaactgtagaaaattcatattttaaaggtaccaagtagcacttaaaaataaattttatctatataaatcacctgaaatacattaaaaaagtgttgagtgaagaagtcagttatagaaggacacataatataaaaccatctgtgtaaaagtttaaaaatacaactccaagcctatatttgttataagtaccactaaataaggcaaagtgtaaaaatatgcataggggaggtaagagcttccctatggaagatttaagtgaaaattgaaaggctgagccaagaaagagtggaaaatagagccattccaggtgaactagcagcatatctggaggcactgaaggggatgtgctttggagtctttagaggtatttagctgtatctgcagtgctggggagaggagggagatgagtatgggaagtctagagtcaggtcataaaaggccttgtattccttttgactcaatcttccatgtaagttttgatgcaatcctgtggacatgaatgaacaattgaacgattgtaagtgaggaagtaagatgtaggtaatggggaaataattgtcttgatcttgatacacaggataccatagatggggagcatgactggtacctagtaagagggaaggagggctgaacaagccagggagtcacagggctggagaacagggtcatggttcaagtcataggggtgctatgagacaggaatgatatacagggtgaggggaaaagcaaactgaaggccaagcccagagaaacccccatttttagggcagaaaatattttttaaaaatgaccctaaaagaagattgggaaataggaaggaaaagagccaaaaaataatgttgtatggtcaggcatagtggctcatgcctgtaatcccagcatttgaggaggctgaggcaggaggattgcttgagcccaggagttcaagaccagtctgggcaacatggcaaaactccatctcttcaaaaaataaaaataaattgccaggcatggtgacacgtgcctgtagtcccaactgttgtctgctccatgggtgctgaggtgagaggattacctgagccagggaggtcaaggctgcagtgagtcaaggtggcaccactgccctccagcctgggtgacagagaaagaccctgtctcaaaaaaaaaaaaaaaaaaaaaaagaagaagaagaaaaagaaaacaatggtgtaattggattcaagttaggagacctttccaacaggaagaattaatttaatagtatcacattccctagactataaggattaaaaagagtcgattgcatttggcaaatagaagttaccgctaacagggagacaagttttgtgcagttacatagaagctgattattttaagctgagaataatatggaaagacagtggaaaaaatctctggtagaatagttttcttcatccattgaataaacacctttttattaattcattgaacatatgcttattgagctgctcttgtgccagtcactatcttagccacttgatgtaagtcagaaaatttttaagaagattgttctcatcctgaagcttatagtctaacattaagagataaaatgaacaataaatataagaaaaatttattttttggcattgtgaggtggtgagatatgctatggaaaagactaagggggatgaggatttaaagggtgtgtttcagcttttaaaatggtggccaagtttgcctcactgatgagacattgaagccaaggcttgaaggaggtgaacagggcagctatgtggatatctaaggttcaagaagctttagcacgagttggacagaggcctgaggtagcagcattcctgttgtgtctgaggaactgcaaggagggcaggatgactgggttaaaaggaaagagaagcaggaagacgggtcagagcagtagccatttcagtgtttgagtgcaggagagcagttacagggtggagcgtggcctgatcttgttggaatgcgtaggccattgtaagaacttaaggtagccattgcagtgttcgattgtaggagagatgggatctgatgcacattttaacagtagcactggctgctttgttgagaatcagctataggaagtcacagataaatcaggaacagctgttagtacatgcatatggtattccaggtgagagacaattatggtggctcagtgtaggaatgcagcagatgaggtaatgagaaggacttgggttctggatacagttgaaggtagagtcaacagaacttcctcatggattgaatgtgaagtgtgagggagtataattcaaggtgttcagtctgataattcaaggtgttcagtctgaccaactggcacgatggagttgccagtacttgttagggggaaaggccatgagtgaaacagattttctcatgtagttggggagttcagatttggatgcaggaatttgagatgtctcttaggatatctgtgtggagatgtcaagtcagcaggaattcctgagacgagtgagagctgggtgaataaatgtgaaggtcagcagtctatcagtgatatttaaagtcatgggactggatgagatcactaagggaatgaacatgcacaaaataaatagagaaaggagccccaaaacacactatcattaagaagtctggaaaaggtggagagaacaacaaaggaacaacattaaagagcgaccgaggaggtacaggagatccaggaggagtatatcaaggagcaaagagagatcacttttgtcagatactgtggataagtaagatgactgagagtcagaaaatggaaaataagtaatccagcagttggttacttaatggaaaaatctaagtttaagaagaggatcatataaacaaacacatgttgttttaaaacattttaattttaaagcatacaaaggaattttttaccaaagtttagatagaggtctttagtacaggttctactgattaaaatttcacatactcttgtttgaaaaaaacatacctttgatgcatcatctatgatttctaatgtttgactgcttaaacacatttatgaagcaaactaaaggtaatacctgtccagagattattaaaccatttctaatttcatatagttgtcccatttatacctcattagataaaattttttaacagttcctaaactgtctctaaaggattcaacttagttttcataggaacagtaactcatatttcatcaatttatggaatacttaattcaataattatagtcatcagttcaatgaacatagaatatttggaaacaaacacaagtaactcagcatacaattcagtcatgagaacagaagtagatgggggtgctacccactctgctggagcctcagtcggagaaattggaaagaacatttcaaaagttaaatcctgctaccctgttaaccatttatcaaatacttactggtatttaccacataagaatatgtaaaatctattacaaaagtaagttcatttatttttcacaccaactcgatatacattccctccattttatggaagaaattggggtacagagagatcaatttacaagaacacgcatctataggaggctgaccctgactctgcggttcaacccaaggtctatatgattctcagttactatcctaagcatcccgacctgtccaactataacctgcctcatccatgacattatctatgaaggaaaggagaatatagagaattcagggtcaagggagggttatagttctttcagatttttttttttaaaacttgacaatcttgctgatgggaaagagttaatgaaatagaaaaagccaaagatacaaggaaagagacagttcgtgcagcgtgcttccaaagaaactgaagagattgggagacaaaagtttactccagtgtaagaacgttcaatgtaatgttatttaatgaaataaaatagctttggtttataatttttaaatgtttatatctgcttattttatgtaatagttttactttttttttctgtccagatttttttaactcctaattcttttactcttctaacagatgctcttaaaatacccttaaggatttcagtgggtgagattgaaccaagcaactatggttctgatgacttggaatgtgaaaacacaatatgtgctttaaatatccgcaaacagacatcatgggatgatttttcaaaagcagtgagtcaagctctgacaaatcatttccaggcaatctcttctgatggatggtggagtctggaagacgtgacttgcaataacaccactgattccaacatcggcctcagtgcaagaagcatacgatccatcacgctaggtatcagcagtcctatgacggagagaaagtgaaatttctgggtttatttatgtttgtgggtttcataacctgattcttagttcattgattaagcacattcaaagcttacttgtggcagctgccggtgctgaaaaacttgagtattcacaatgtagccattatgtaatgttgcctgttaatataaaaatgcttttatgccccaaataatactcagagagtaaaaaacatgaaagccgttgatgaggctttgtgattgcacttgctattctagataaatgcaagaaactaaacaccccacagctgcttgcttttgcgcaagtactgaacacagctcaaaatttgttcttgggttgggccaggagcactgtagtgcattagtaccttatctccaggacagattttctgatgaagtctagacttgaaagaagcactttaataaagatatattcaatgctcccacatgggatgaatcagggtggtaattggttatttcaatttgatagacagcacaaaacagattccaaggaacttacgagatttgctttctgctgagcatagtaagttctctgtaaatattaggtgtccctgattagttcctttcttcttggtccaggagaactaccttctatgggaaatctgcccctttgcaaggactgtattgggtgcttataaaaggtcctttcagtggtgtcattttacagataactccgtacaagatgacttgcttgagagcacagaactagtgagcaaagcagacaggattcaaatcatattctgtctgatagaaaagcttgtgtactttcaacagcaccgtattggaaaagaaaggtccaaggttgagggaaaagtgggctttttaccattgctatttatctgtcagattgttacatcagaaagtgttttattctgtttacccatatatgtttattcactttcaaaacatgttactagtttttagagaagagtattcatgacaacttgattttatggatctttggcatgatcattaaaattactattattggctgtgcatggtggcttatacctataatccaagtgctttgggaggatgaggcagaaggatcacttgagcccaagagttcaagaccagcatgggcaacatactgagacctcatatttacaaaacaatttttttaaaattaggtgggtgcggtcacatgcacctgtagtcccagctactcggaggctaaggtgggaagatcccttgagcccaggagtttgaggcagcaatgagctatgatgaagccactgcactccagcctgagccacaaagaccccatctctttaaaaaaaaaattatagaattgttataatgtacttaaaattgcattaagaaatgattcagttcttaggaacacattttgtccacacatggagtattactcaaactgtggttctggcccagggtctgataaacaaagtcagtacaactgtgttttgaaggaaatggccccccatcagccttcattcagctaatgtggaaactgacaaaggcagatggatattcactgccaacagataagtttacctctgtgaacagtgcatgctaaggcttgattattgcagtgttcatgcttgtctcagaggtatagagcaccctagtagcatttcacatcgaaaaatcgttgagttttgtggataaaggacttagtttagtgcctcgctgtaaccacttcataattggtaattattagtgttattattgtgtgtatgtaagtgagtttgctggattcataacctaagctacatgaaaggaacttcaggtcagcagataaacgcaattacaggtgagtgtgcatgtatattggaggcatgctgagaatagatacttaagaattgatctgtggaaggaagagatgaaaaaaaatacttattaccaatcatcccctagggaagatacctatgaagtggaaccctttcagaacaagagtgagcagagggcccgcaatgggagaaggcctgccttgttctgagcacctgaaattatctttttttttttttcctggaatctaaaaatttgctggaaagaggctcagggaccagatcataaatgatctcatatctcacccaaagtgctcaggctttgagaaacaagctttggaagaaccctgaaacagttttagattatggacagccttgttcttgagagcttaaccctagaaatatctgagtggatatatttgctttctagatctctccctgaatccctcctatgggctgctttggagaagtctgtagattgaaagccttcctttcaaccttcaacaagaatttcattagggagctaaccccttgtgtggccctatatgtgttccgtacatgcctttgacaattaaagctctgaattccttagggttctcacagaagagagcatatgtttacccttgtgagaaaaaccactcataagcttcccttgacattttatttcattttttgaaactaggaaatgtgccgtggtcagtgggtcagagcttcgcgcagtccccgtgggactttatgaggaagaataaggcagagcacatcactgtgcttttgtcaggtaaggatgtccctaactaaggtgacgtttaaagagtgtttgcttcatggctgcctcagagcaccagttcttaaatcttcacgtttcatcccatgtcttctagccacgcacatgtgagttccaccactaggtaattagatgtttttaaaatgtttgattaaggggaggaaaactcaaaagctatgttcttgacacccatggtaatgtctgtctggatcattgatgcctgtcattctgattgcatcactcactggaagtaaaccagaggccaaactggcatgctgataagagagtgacagagactgtgttaaaagagaaatgtctttttttttttttttttttttttactgtgcttaataatgcttaatacgatgatcacgatggtacaggctaatgtttagtgagcacctgctatgtgctagaccctgttgtttatagcatactataagtatcaaatcatttaattctcataacccaatgagatatgcatttctgcttatccctattttatatccaaggaaattgaggctctgagagattgatattcttgcctaaggtcatgctgccactaagtggtataggaatactcaatttctcagcccttgatgctaaacagctatggatttcatcatgtatttcccatacttgggaatggagtctgaaaattcaatcttaactaataaagatttattttattacttgaactggacttactgaagtttaaagaaaagtgtgaggccaccccagaaaattgctttaggcccaaacaatgtattgagagaatggcagaacttggggggaggggtggcgagtattgccagtggacctaacggtggccaaggctaaagctttctgaggattgcaatgatctatgataacttttacttatgaactgtaaaacatcaagcccagcaatcagcagatactgggcacagtgtttgggctgggatcgggaggccctgtctatggttgctgggaggtaggtgggcatcccagggggtggaggaaggaacagctgggagctcttgggaggtcaggagcagtggcagtttatcagccagaacaaagtgtgaggatattttcacaacagaaaggcacattggtgcctcctggccaaatgtcagctctgcctacataagtcaacaaacacattcatcttctatgatagattctgttgtgttttgatcgtttatatttaacaagggaacacccatttttcttcgtctgtcctttcctacaggtcctcaagaaggctgtctcagtagtgtgacttatgcctccatgatccctctccagatgatgcagaactacctcaggctggtaggtggacactgctgggtggagacctgtgttttccatccctgccactggaaaattgggtggcccatttttatgtttaaaggaggagtgcaagcccccccaccctgtgctctgacaccgttaccttccccaccagccccctccctggcaggctgcccattacatagtctggatttctgtcactgtcatccaggtatctattgcctggatccagagaccacctgtgacctgtgaaatgccataatttgggcaggagcaggatgtcttcctttaacaaggacttgatgtcaagtaaatgatgatcaatatgaaagggaatggccacaaatatcaagatgccttactataaacttttataatttaaaattgagtaaagatgctagcattagtgagaaggttaatttggccactttaacggaaaccaaataattacagcttaaacaggatagaagtttatttttcttaaacatataagtcccagcaggtgagaggcctgaggaaggagaagtggcagggtgacctccccaggatctcagcaccctttctccctgctccactcttccctgggatgttgtttgtgttgcttggtcaaaggtagtcaccactcccactctcacttcctagctggaaagagagaacctggagggcaggcctttcctttcaggggaattgcacacgtcattcctgcccacatcccattcaacagaacttaagacacctatcggtgcctagctgggaagtggagccttttgctgggcaattgtgcacccacctaaaaccaggtggtctgttactaaaaggaagaagaagaatatgatcattaaaagaaagtagcaaattataaatgtaaaatggataaatgtaatgctttgcattcattaaatacttactacatgccaggcaatatgccaagtgctgttatgacttattttatttattcttcaaaacatccctatgagataatttcatccattttacagatggggaaactgaacagagagaggtaaaatgctcaaagtcatgcatctagcaagtgatgaagccaggattgtgcaagtctctgatgtgtatgagatcaatctgaaactaatactactggtataaaacattaaacataattttgcttgctgccttaatttcgatgacctttttaaataaatgagttggaactatgacccttgacaaaagttgtttccatagactgtgaattgatgcctttgttttcacgccttatgaaaagaagtattcaaaaccattccattgatcatctagccaggctcacagttaggattagcttttgtaccagcagccacagtagcagagaaacattcaaagcctcacagtgtagaaaaggtggattctcctgaatctgatactttgacttctttgctttactctttgtcccccttcctaaaagcatgaaagtatgcctgtgatgggaaggagatgtatatcattacttggcttaagtgaaggttgaagggtgtgatcaactggttttcaggaatgttagcctcagtctctcagtagaatcagctggtagaaccactcccttctctccccttcccccttgtcagcttctccgtacaaggcaaggttctgacccagggcttttccttcatccattaagatgataaaactgcaaattagcgttgactagcaaatctgtaaaatgaaatgtctgctagtcacattatatgtaaaatattccaagtacacttatatatgtgtctgcttatacataagacataatttcactaccagttaacagcaaatcagagaccaaaactgttgttgattctatattgaattcagtgagtgtacataaaagacttctttaatccaacaattaactcttgaatgaatataataaaaatgtatcacttatttcagcagtcactgcaaaatttaaagtgactgagacaacaatatatcataatggttgtgaatgttttctcttccataaacaattataatccccttaagagcataggccctgtgttatgtatttttgtgtcctgttatttcagttgtttcacaactgtttattgagagcctcttaaatgcaggtggtgttttagaaactgaggatagagctatgtataagacacattgcctggcctcatacagtttaccttctagtggtaaagaaggcagatttaaaaaatatcaaatgaataaatgcacatgtaatgtgatgaccagcaccaacacaagtgtaaagaaaaataaagcagacaaggagataaagagtgggtggacggggaggcagaaagcactatttttagatggagttatcaggaaagatcttactgtaatgacatttggactgaaaaacaaatgaaatgaagagagtcgccttgtggagggtgtttgaggtacagggaaccgcagacacaaatgtgtctaggttgacagtgaagtctgggaaatgatcagaaactagatcatgcaggaatatggcaaaaactttgaattttactccaagtggataggaagccactgagggaatttgagccagagaatggcatagcttcccagttccacaaataactacaggcacattgatgtgtgttgaattgttggaaatctgtacagtagatatacaaatgtagtaattgactttgtttaccttcaacttttattttacgttctggggtacatgtgcagtttattaaataagtaaatgtgtgccatggtggtttgctacacagatcatcccatcatctagatattaagcccagcatccattagatattcttcctgatgctctccctcccgccagcccccactgtgacaggccccagtgtatgttgttccaccccctccaccatgtgttcatgtgttctcatcattcagctcccacttataagtgagaacatggagtgtttggttttctgttcctgcattagtttgcagaggattatggcttccagctccattcatgtgcctgcaaagaacacgatctcattcctttttatcattgcttagtattccatggtgtatatgtaccacattttctttatccagtctataattgatgggcatttagattgattccatgtcattgctatcatccgtagtcttgcagcaaacatacgtatgcatgtatctttgtaatagaatgatttatattcctttgggtgtatacgcagtaatgggattgctgggtcaaatgatatttctgcctctagaaagaaatgaggagtcgccacactgtcttccacagtggttggattaatttacacttccacctacagtgtaaaagtgttcctttttctccacaaccttgccagcatctgttgtctctggactttttaataataccattctgactggcgtgagatggtatctcattgtggttttgatttgcatttctctaatgatcagtgatgttgagctttttttcatgtgttggccacatgaatgtccttttgagaattgtctactcatgtcctttgcccactttttaatgggtttgtttgttttcttgtaaatttgtttaaattccttgtagactctgggtatgagacctttgtcagatggatagattgcaaaaatgttctcctgttctgtaggttgtctgttcactctgatgacagttgcttttgaatagctaaccttttattgagcatttattatacaccaacctctattctaaatatatggataatctcatttaatctttctatgagatagatactccatacaagttagattttacaggtaaataaacaaagactcaaagtaatttacccagcgtcttcagcaattaagtagtgggacccaaggagttgaaactagcctttctgcctactcatgcatgtaatcatagtttattagcctaggttattagcctattgattaagcattgcagtaccagttgttactatgtatgcaaatatattatataaaatgcatgtgttaaaacccttatgcagaaaaccacatgtagtgaagactttaaatcaggattctgtttctgtttctgttttttaaaatgatgttatttttaaatacttttattgttaaaaataatacaagtacattttaaatctccacccttgatttaataggggaaatattcaacccaattgagttttgaatcactagtaatttattgtaattgttgaattttttgcattaacttaaacatttagccagttgcaatttttgttaggttatttgaaacctcgtgttttaataattcagtgactatgagtaattatgatattagaaaaaatgctggagttcggtcatcttgatctgagtgcttctttaaaattaagactctgaatgtccaggatgggatccttgagtttcttctacctgtttttcattcacttcaatatgtgccatgccagtcactgagaatcatcactaggagagcctagttattctccgtacattcccaaaataagtttgctactttcctataaaaataaggttgtaagtgatagttatgtgtctaagacatcccacaaccctggtagcagagggccagctctagtctgatctttcttaggaaagggaggagcaagcctgggtgaggtcctagtgaaagtgggaagcagctggttgcctgatatgaggaagaggcagctctgctaccagtggaacatttgacttccacagcaatagtggaagaggatcctgggcagtaaatgtcagcctagaaaaggtctaaagcagaaaaacttcatgaattccagaggctggctgacaagggagcagttatgtctaaaagttccatcttatagttttatgtttttgaagtagctgtaatacccaaattattatgtctgtatcaataaatggggacctgtctatatttgaagttagtaacccagtctgctatgtatgtgaactgtaatttctcttaaattcctattactcttatacctcttctttaaaagggacctcaacaaatgattaaaatgctttctaccgtgaagaattccagttttttatattccaaatgctggatgtaccaatattgtttgaggaaattttatgttaatgaatagaccgtaattgtgccatcagtggctctaaagtcacaagtaaattagttatttaaaatcaggtgtcagatatgggtggaatgaaatttgtagctataaaacatgtgattttaacggtcccaattttattggctccataatgcccttttatttttcgtttttgtttagtcagcacaagctggcctagaactgtttctggacagaagttccttttcctcacactatgtgtgacaagtgaaactccaaataaaacttgggatttattgctttaaaatgccaccgctctgcaaacacattacaggtgccacatcaacagtagtggaaatcacagctcctctggtaaaccccattctgcaggaaagcattgtggaggaaaaaaatagagatgcatggtctattgttgaggtcacttgtttccatttaatccagaatctgtttggctcacaaagcactaattgacatgtgatgagcttcctgaatagtctgtgaagacacaagaataaaagggattggtaccaattgtgataatgaggccagtgtccctttatcaataagcagaaatgtcacactataaatgtgcacttaggggataattctggtaactacaattaagactgtaattttaaaagttgtgtttgatctttttcaaagaacagatctcctttcaatacaattagaatatttatatcccactttccccaaaagatctgcctacgtatctatctttagagccctctgctggaagcgtggagtatatatattcattatacccaagatcttgattacttggagaaatatgataacttcaaaacaatatgtaatgtcttagcaaagctttgcatgttcgacccggttctgatagagtaacaggttcccagtaattaaggtttttttttgttgttgttcagaatttaaatggtaaccaacatgactatatcatttgatgagataacagaataccatttaccaaaaattggtaatacctgaaatggagagaaacctacgaatgaaatgcatgcattaaaatgtatgaatgatgtggaagtatatacatttgtttttctctttacctacctaattcagttatttatttatatttctgctttatcccatgagggacattagactatgtaaatgcaaagggcttacatctagtgaatggccttttcaatgaaattttaaattgaatgtttcctgcatgtgtttcctaaaaacctacagtctgagaacaaatgaagtgttgcaactaaagacagcttctttatgaagttgggtctctttatgttatttgatttcaaaatcaatcttaagaaagtgtcggcagtttgacaggatggccataatgaatagagcactcttgttctcagaagtgagacaagattaaatagccacgctagttgaaaatctctggggtaaatcttgaaaatctttagcctgtttattttcagtaaatcttaaaaattggtatcctgtttcactggtatgaaatgatacattacttgtgaaaaaaaattctacccaataaatcatagcgatttgggattaatttggaaagctcaagagctccggtttaaaattgcacctggctagcaaattgcgtacctaatagacaatttcccactgaagtacttttgaaaactgacaaaacctcagtcacagaaaaatagaactgaaatctctctttggcaagaatctggaagcatcttctactatcattaagactaatagagtattaggcccatttatgtgaggcctacctgaaattaggtaggaaatattatcatccttcctctaccatcttcctggtgattaaaaaaaaaataaaaaaagatttataccacttagaaaattgggcatttatcctttactgcatagtctctgctttttgcagcactatgatattcttctccactcccaggagtcctttccacatccatctgaagactgcgggtcctagaaatacctggacaaaaagttggtggggattagtgagactgtgctacatcccaggtggtggattctctttaagcactcagcagggatggagacaggagctgctgggctgtggtgcttcctgggactgtggtttatcttcatacattgtctgctgtgttggacagtaggagttcattccattgcagccattgctagacccaggagtttaatcagcaactgcagacaccaagttttcatccacccactgacccaagaaggagattcagccacccaatttgtggacagccagtgaagccagtggtggtccacacatcctggtttcctgcaaaattcttcctctggtttcatagtacataaacgaataataacaaattaaccatatacctctggaagaatactgcagaacagttttcagtctgaaaactcagggaagaacacacccttaaattatttgctagtgtcttagtccattcaggctgctgaaacaaaatatcgtagactgggtggcttacaaacaacagaaatgtatttctcacagttccagggtgtggaaagttcaagatcagggggccagcagattcagtgtctggttagggcctgtttcctagttcatagatggcaccttttcattcaatcctcaagtggtggaaggggcaaggggttccccttagcctcatttgtaagggcactaatccctcctaacaaccccaacttctaatacaatcaccttgggggttagaatttcaacatatgaattggagccaggggaagcaacacaaacattttgaccacagcaactaggaaaaacagaaaaagtttggaaaattatgttgtctacaggatgcaaggtggtagactatgaaagcagggcaagaaagtcatagtagagtctgggcttagattacaaggaaaagtgttagaaaggagatggatgaggtaaggaactataagaacaattgaaaatgcaatggcataaagttgcacttgactatagagaacagaagtgagatcgtgaatattttgcgtgttgtgcaagactaacttgagctctctcaatgcaaaagaagacagagctataatgatgagataagatgacagatactcgcagaaaaaagagaacttaagcattataggtgttcattatagttaaagagaactagaagaggagaaattaccaaaaaattggagaaaaatgtcctaatccaaaaaaattatgactatgcatatcaaaaggacttaccatgttccatttaagattaggagaaagaggctataactagacatatctgggcagcattttttaatgaaaagtacaatctgtacgtcacccaggcttccccatctcataagtataaatgaaaacgtattacttttcaataattattatttaataataatgtatccctgcagacttgtggccccattgccttactgcttagaggcagaacctcagcagcactttctagggtagtctttcctgtgtctctggggaagttcttgctccaggtttggtccttgcctgcacctccaccgtaagccttttattgaaggtgtactaataattgaacagtattccaactcagagaatattacgggaggctaccagacatgatatctttcagagcctaaaacccagtcccaagcccaacatcaaggagccccttaaaggaccactgccctcttagctcatggtctgaatcctggtggtcatgcctggctttcctccacttcccagaagtgctcaccaaccttccttagtctccttagaggccaaacctcatgtcttttttctttttaaccttgagacagggtttcgctctgttgcccaggatggggtgcagtggcatgatcttggctcactgcaacctccacctcccgggttcaagcgattctcctgcctcaacctcccaagtaactggtattacaggcacccaccaccacacctggctaatttttgtatttttagtggagatggggtttcaccgtatttgccagtctagtcttgaacgcctgacctcaagtgatccgcccaccttggcctcccaaagtgctgggattaaaggcgtgagccaccacgtgcggcccaaagctcaagtcttaaaggcctagggtaaggaaaaagtttagttcatctcttatgctaagagcttttcttcaagccttccttttatatcccacaatctgcctccttgtaatgatggactggggcatttttactatcttcacagaagtccatcccagctaccataaaggatgggccttttcctgtgatctcaaagggacaacctcatcagagtacaagagagagacaacacagagatacacacacacattcttacattgtcctgttctagattatagagagaacaaactcaaaacttctctaagtctgggtggctcaatcttcacttgagcaatatcaactgtatcagttaggttggaccctcacctgtccaagtcctttccggcaagaccttgctgcaagaccagctttccattaagaaagcttctcccaagcatgtgtgctgggcagggtgcaggggtgtcagccctgggatgacagaagtgggaggctaactttcctctccatatttttctcaagacatcgctgcctttgccctgtgtagatgataattgcctttccatccaagtgcatgctgaaactccatgttctcaggcgaggtatccttatacacgaggataaagtttaaaaaatatatataagcatacaggcaggagattttctttttgacaaagcgaaagtaatccatctctacctagatttctttaaaacactgaattccagaatggaataatatataaagttgatctgagttttatactcatcaaaacatcttttacctaagaagtcaacacaaagacattatctgatatacaacagctgtaaaaagatgacactcatgtacccatcttttaaacatacacacacacacgcagccactatgcaaagaaaaaactggaaggaaacaaaaatatttacggtgactgtgggtgctgacactcagtaattttttattcttctttatatataccaaaatttccataatgaaatgcattactgttttaaccacgaacaagctaaataagcattgacaaaattccacataaagagcatctgcaaaggataatatagaaaaagttacagaatttctggaagggacaaaatgaacttggaactgtgtgtctcagctaccctgcagaccctcgctatggaaaatagagggaaaaaatgtgtttttttataaagtatcagctcttgctaagtaccctttgcccatgtttcacattcaaatgagagtacaggtgtccaatgataaagctaatctctaaaatattgtttttaatcttttgaaagtatgaggacaatcaaaaaagaattccacacctgtgtaccacttttttctctcatcaatttagcatcttcaccctagctctctacttggtttgttaataggttgagcaatatcataatgtcattttccacggcccagaaggaagcttgcaagactacatagtacatcagcttgcactctgcctgaaggtattgattacttgtatatcagctgcttttctttgaaaattggcaagtgcgtagaactaatcaccctattttcttatcacagcacagacaaatggctgcaggattctcctgtgaaatagtgagagctgaagtagatgctggtttttccaaggaacagctactagacctgttcattagtagcggtaagaacatttcagcaaattgcctgtgataacctaaaggcatgctcttcaattatgccattaagagaaaatacactgtgttgcttggggatacatttaagataactttaattattcagcagctgtgggataaacacttgcaaaaattatcttcatgtgtatattattgcatttgttgagcatcctgcatttttttcttctttttgttattaatcattaattgttgctagcatactgtcttactggcactagtggtataccaagggaggaggtggtaggagcagttcaccctagctggactaggtattgcatctttgatgctgtttagaactgctggagcatggtggtgatacacagcagatcaactttttagtaaattttattactcataaattctctacaaccaatacatcccttagtgctgcacctggggccaaccactttctctacctcactcttgctatgccattgactggcacttagtgaaatacatcacatgcactaattaactcattcagtctccacaacagccctatgcaagtgtaggtatcattatttctactttcaaaggtggggaaagggtcacagagaggtccagtaatttgccacagctatggtagtagcagcaccgggattaaatatgtttattaatgtaatgttattaatgagttttcgatcttagattccagggtctaataccccacgtttcatcacaggtggaattagcataaccctgcattgcatactgtagaatagcataactagtgactctgacacaaaactgaaatggaccagactttagtctcctagggctgaaagccacagagacccctggggaaggggcgaaggaagcagttgtaagattggagaaggataggttgaaatgcaaattcaaaatctctttgttggggaggggtgcttctatatcttgtggccagggcaaatgtagaccaggcttaggaagatagaacagtggcatgatctcagctcactgcagcctcgatttctggggcacaagctaaccttccacctcagcctcctgagtaggtaggactacaggcacgccccagcacttccagctaatttgtgtgtgtgtgtgtgtattttttgtagacaaagagtttgccatgttgctcaggctggtcttgaactcctgagctcaaacaatctgcctgccttgggtctcccaaagtgctgggattacaagcgtgagccaccgtgcctagccagcactttctaagtcaacagatgaatagataaagaaaatatggtacatatacacgatggagcgctattcgaccataaaaaaaagaatgagatcctgtcatttgcaacaacacggatggaactagagatcattatgttgcatgaaataagccaggcacagaaagacaaacatcacaggttcttaattgtttgagggatctaaaaatcaaagcaattgaattcatggagatagagagtagaaggatggttaccagaggcagagaagggtagtgttgggtgttggggagtaggtgggggtggttaatgggttctgaaaaaatagaaagaatgaatgagacctactgtttgatagtgactatagtcagtaataattgtacctatagtcagtaataacttaattgtacattgtaaaataactagaaggaggtaattggattgtttgtaacacaaaggataaatgcttgaggggataaatataccccattctttatgatgtgattatttcacatcacaagcctgtatcaaaacacctcatagacacacaaatacatacacctactatgtagccacaatttttttttaaaaaagaaatgaaattaagaggcaggtttagggaagcactgaggataccacaaacctagaagcacattttaggggcaggaaaattccagtagaatctgaatatcactgtactacacaggccagtcttgggctagaaattagtgaaagttagctacagaaagctgttttttctgataatgttactaattgtagctaacattttgtaagctcttacactggtggccctattcttttttttttttttttttttttttttttttgagacagagtctcactctgtcaccagggctggagtgtggtggcacgatctcggctcactgcaacctctgcctcgctggttcaagtggttctcctgcctcagcctcccgagtagctggggctacaggcgctcgccaccacacccagctaatttttgtatttttagtagagacggggtttcaccatgtaggccctattctaaacactgcatttattaactcacaactttctgaggcagatacagtcccatccctgatttataaacatgaaaacacttgaaataaagggttaagtgtcctactcaaagatcccacagcaagaacataaaacggaactcaaaccccagcagtccagctcctaagcctgaccttaatcactactggctttaaaaacgccctagtgccaaaacatcatttttcccctgttatctaacaaaagtctcccgcattttttcaacttaaaatcttgcttcttctcaaaataagaagctaaagtattttgtgcttaccctatgggggtagatagcaattatagactgaattctgctctaagcttagagagctaagaaaactggagtgcaatgaacaaggtcacgaaggatgcaaaggtgaccaactcagcatttctagatctatggtgggcatcttcttaaaaagagctgctcttcctaatttcccagtttggagagtggcccatgtctcttgactcccacactggaaactcagatctcattggcaggcttgaaaacctcaatgcccccaagtaacaacaagccacaggaagaggtgaagcaggctgggcagggctgcagggagaatggggcatgcccccatctccaggaggggcagcagctttcagaaccagctgtttgttgctgacagaattgtaggtccagtgtcgtcaggtcttgtgactttcaggaagaagccagaaatccaggtttttatgtaaaaactttgggattttgttctttcaatattgctaactattctaatttttaaaagcaatatgagaaccacatggaaccccaggtgctctcatttgtgggcccctcaccctcgtcccacagtccatcgtcacatcctgccagtcagtctcaatctgctttttaaaatccatttccatcagcaccatcttactttatgcctccctttcctggaactcctcacttttacatagacggtttctctgtctcttgtttcttctccctgagcattcttcacaggccagcagacctctgattaaaatccctgtgatttctgcccctccccatcccgcatctctccattgcccagtgaactaggtcgatgctgttcaaggccttctattctagggcattcatccacccaatctgctgatctgacccttttaacatagatacccatgctccagcagaataggatgtttcttccttatgtatcctttgcttttccactctgcatgtctttgctcatgctgtagtttccactagaattaaggagtaaacatgtaaatgcctctcatcccacagacaccatggctaccacatggccggtgtgatgcagagtagtctgttatagactagtgattaaaatagacacagtctctgcccttctggaaactatagaaaaagcctctgtcgaaatactttaaggacacctcaaatgacgcttctgtgattcactgcttctggtaaacagcagtggattttatttatacttctgggctctacccaactgtatgtcaaggcaacgagggtattatttggggttttgccttgtcccacacacatgttatatgatgagctccttgaaggctagcactttaacttattcttctcttagcttgcatataaattgtcaataattattttttgaataaattggtgaattttctgatgtaagaaatagcataggcaaagaaaaagagaattattagtttaattcaggtggcagcaagtagaacttgcttagagtcgaggtagaaagaagtaagattagaaagacaggtattgataagggagtcattgatgtctaggcacaaagaataatttggattttaaaaaatgaagtgtttgaacaatagactaaggacaaaatactccactctaggttaaagaaggaagagtaggaaatggtatgtcgtctccaaatacagaataaaaatccttctatacccttcatatcacatgactgtggtttggtaaggaggctgcgaatgcatactataattgggtcaaatattccttagtgtaaggtatggaattgggttagtaagacagatactttttaaaattgcaaatgattgtaagcagtaaagcagaaaagaaaattcatacagaaggatttttattctgtatgtagcttagtaacttgtaagtatcaatatctttcttcactttttaataagaaaactatgatacaaatacaaggttcatctgctaaggccttgactgcagttgcccaagttagcaaggtgagcataatcacttcctgtctgcctcactccccatatctaggcagtccctaagctctgtggaatctgcttcctctatctcctcctcctgctctccattcccccatcacctattatttcttgttcaaggcattgtagaggcctcatcattaacctttcatatttcctctggtctcactccctccatgggccctccacaaggcatctgggggctcactggaggataaaaaaccattcagacagttccctgctgttatactcccaaggctccagaatgaaagctaaagctctcagaatctacatcaggaacattgtggactggcctctcatccttgtcctgctgcagttcaccctcatctcctaaaacccactctacctccactgccgtcttctcagtaggacccatgctgtgggctggaggctgatgaagacatagaggagaattagaatcaacaaggacaccagagacttcagagcagtgcaggggaactcctatgagccacagggaaggatccatcgacaggtgtggtgtcagttctttcactgtgcagaaagcatgcagcagggaatgatccttcagtcaagaggcgatggatgaggccacagggtagagaagtcagagatctggatggaggaaaggggttttctaggctattccactcaaacgtttagaataatgagcatatagggattatctaccagctactctctttttttaccaagaaattaaagtgatcaaatagtaagtaccacaactgaagagtacactgattcctgaggtattctacacgtactcctgatggttaaccttattttctctaaagagagagccttaaactatgtgggttgaatggggtgagaatgctgaacttctgtcttccactgagcacagcacacattgccttatgtgttcctctctatgacgccgtagaagaaagccagggaacaggcacagaaaagagttaaagagggtgtgagcaaaaagacagaaatgaagagtagcaaaagtattttaaataattaggtttaagaatctaaaacttaaatggagattaaaatggtgccaatgaagaaaagaatagagaacaaaagaccatttcaaagaaaatgacacagcacttattctagcataaattactttgtgtttattttaaaataacattttcttctcatattccctttcttgagagagggtcatgtcatatgactctgttatttggtaaggaggctgtgaatgcatattagaattaggtcaaatttctcctcagtataaagtatggacttgggttagcaagatgatactttttaaaattacagtgactgtaaacagtaaaacagaaaaaaaaattaaacactagatgggtattttaaagtaatactttgaatttttcaagggaactttcctttgtaaaagtaatgaggatagggttgctgttacaataggagactatgacaattggagtctccagaaatgagtttacctccttgggccctgcattcctgggactctttaaaggcttgccctgtgcttcccacttggcctctcagaacatcgttcctccagagccggggtttaagggcacatggaaaagaggggttgttttctgtcctgaaaggggagataatagacttggagtcactcacctacgacacaaagcagtttgggtttagctagaaatgcgatatgctaattatttttaaactgataagtttggctgcagaattcactctctgggacttttaatataaggatgtgcaaaactgggatgtagccctgagcctcacaaagacagtgtccagttaaaattaccaacctgcaggagaggagcagggctgagagagcctataaagttggaagaaaaaggtcaaaaagagcagactggttttagaaatagcgttttgaagtggcacagagcaaagggaattcaaatggctgactttttggccgaaggtaaaaaggaacctgcagctgtaacatggggtgtgtggccttctttcacctctccataagccctgatcagagactggttgatccttgaaactgtaatgagttcctgcttctgtggctggttaatattttagacctgaaactacgcagaataacctgaactagacacgtactatttctcaactaaaataaaattaacctttgccccaccttgactaaggatgtggaacttaagtggtcagatggaaaagtaggtactaatgaaaaactgaggcaatgaggcaagcgaatgaagacaaagctttcccccaaagaaagctgtgctgtttgacccttgattgctacttcatgggagaccaagataaagatgaagtggaaagataacccaatggttatgtatagcagcccttccccctttttgtctagggcacaaactgtccattgaatgtgagatgtattaggtcactagcaatatagtatttgcttgaggacccaggagaatgagcatattgcctctttccaagagaccccagcatgcctgaaaactcatttattttatctccagcctggatccttcctcaatgccctcaccctcatgccccaccacctgctgcacatcagagaagcaatgcttcactcatcaaacacatcaagcctgaaacataacccatcaccaccacctcctccccaagtacatgcttggtcacatctgctctctgcctccattaactgctcagcctcttctctggtggaaacctagagttgtctccagtatttcctctctgcccctctttcaataagtcagccactgagatttactgattcggtctcaaaatgccttttcattctgtgcgttggtcctgggtgaggctcccatcatctctttccttaaccatagcagtaagagtctaggaggtgtgttctcctatttctttcctcctcagccaattctctgcaccatgaagatctcagagcaggagtcaaatcctgtttatccccctatttaaagacttccactgattcccagaaccagtagctccctcccaacaagacattctgagtcttctacttttcatttttggcttggtcctgaggcttcatatcagcaaatctcgcccctgattgcacattccaatcactagggagcttttacaaaatgccagtgccccaggcccagcacagtgcaattaaatcagaagcgctgagaatcactggggatgggtccagcgattcctgcagctcaggatgaagatgcagcctgccttccgcagctgtgactgctgggcgccctgccactcctgtggcaccaccccaagttcccagccctggcccgacttgctatatggatcagcttttagctcaccatgatgacgcttttataactattctgaccttgatctgacgccgtattcccttctagaattgaatcctgcccagctccattcttcggccagtgccatttcttaaacttagtttaaaatgctggccaggtgcagtggctcacacctgtaatcccagcactttgggagggtgaggtgggtggatcacgaagtcaggactttgagaccagcctgaccaacatggttactcccatctctattaaaaatacaaaaaaaaattttgtatttggcatggtggtgtgcacctgtaatcccagctactcaggaggctgaggcgggaaaatcacttgaacccgggaggtggaggttgcagtgagccgagatcacgccactgcactccagcctgggcaacagagcaagactccatctccaaaaaataaataaaatgctacacacccccagttagaatgagtcacttctggcatgccatagcactcagcatccagtacctgtagcaaagaggcattggataaacatttgttgaaatgcaaggaaatattccttccttcagatgcattctggctggctgcagcagcttcagagccacttaaactggcgatgcacttaacacaaatcagggaaaagctggagaccttcagtcctcagttacagaaaaccagatacataaaccatcaatcctgtgtgtttttttaatcgctgaattaaaaatgtttgttagttttccattgttgttttcaccaactacggatttctcatacttccacaatacatctatttctgaaataacatttgaacccaaagaaacatagaattttagcattctttaccaaacagctgtgttgaaagggatctgacacacactagatgctagtgttagcagccctccacaagtacaactagattgagaggtggctgtgattgtttctagccttctagattttaaattttcatagcatccagaagagccatttctgtctgagaagagattcatttacagtgttcaaggagttcttttgaaaatgaaaatgcattgtgtctatagtaacaagaaggaattgagaatatactatcatgaatatttgtaaaaagtagactatttggtaatgttactctcaagtatcctaaactggtttcttttcaaggttaatttgactaaaactgtggcatcttagaatcttcaagaaactaaagtgattttattttgtaattgattagtatatgggaagtgccatatagaatacattttaactaaactattaatagtttctgcttagtagatgccaggtactgttttaagtatgttttgtgcccttattcatttcctatatataatattaatttttcatttacttttccagctttcattttgggttgacagaaagtcagtccttcccatcctgagtgaaacgaatgggaaaatatgagtcggaagtgctggattttactcctcccttaccattgtttctgagaccacaaattacttcagcctctctgagatctggaaaatggaaagagcgatttacttatctctctgaggtcctgtctacattttttttttttctagacacagtcttgctctgttgcccaggcagcaatgcagtggcacagtcacagctcactgggctcaggtgatcctctcacctcagcctcccaagtagctgagaatacaggtgcctgccaccctatctgtctaattttttgtattttttgtacaggcagggtttcaccatgttgcccaggctggcctcgaactcctgggctcaagtgatctgcccaccctggcctcccaaagtgctgggattaccagcatgagccactgcgcctggccctgtctacataatcttatgaacattttacatatgcataatttaaaggtcatttaagggcttttaaccttttgtattatgaaatagatatactaaaatatatactacttatgtttacagattaattaataatttaaaataaaataaccatgtaaccactgactaggccaagaaataaaatattctcagctctcagaatgtgactgtgtggtccgtcccccttatcgcaaacccttccctttggaagtaaccactactctttcatgataatcatttcttagcttttctttatagttttactccctgtgtatgaatccctaaattatagatttagtgttgcctgttttgaactttacatgatgaaatcacattgtatataatcttttatgatttgcttcttaatatattgtttgtgagtcttccatgttgtaaaagttgtcatttgttcgctttctatttgttgtatgaacatactcttatttattcatttattctattgttgatggacattgggttgattccatttgagacttgttatagaacaaggaatgttggatcattttgagtgtgttcaaacttatcaaataataccgaacagttttccagagttgttcactccccaagcaatttaagaacattcccattataccacatctttgctaatgctttataacttcagacttttttagttttgccaatttgtataaatttttgtcaaaagcttgaatcactgaatttccttttttattatagcttgtctgatcccagtgaaacaatctcccagtaagaagaaaatcatcatcattttagaaaatttagaaaaatcttcactgtcggagttattgagggactttttggcacctcttgaaaatcgcagcactgaaagcccctgcactttccaaaaaggtaacgctaataaagggaccatgctgagaagcaagcttctgtaatattctaatctttctgtttcccagagtaccagttatacttcatgttctttacgttattttaatttgaatctgtcccataacataactcactgaggatgggccattgctttttggtttgtttcaggaaatggactgtccgaatgttattactttcatgagaactgctttctgatgggaaccatcgccaaggcctgtctccagggctccgacttgctggtgcagcagcatttccgctgggtgcagctgcggtgggatggcgagcccatgcaaggactgctgcagaggttcttacgaaggaaagttgtgaataaggtaacaaacagcaagtgcagcctgttgccaggagagcaggggtttttgttgtcaggagatctcagcttgagttccaccactcactaactatgcagccttgggcaggtacagctttttgacattcaagggccaaaaaacataatgaatgtgaaacccataacaatttctgcactacattaactacaagaaaaagcaaattagttttaccgtggctatcagctgttctcaaggaatctcaccaagttctaaatgctgtagaaggcttggttagaaaattaatcactcttcttaaggaaaacttacatctttcttggagccttcaaaacatacacccttgtgagcacattttacaacaggcctgttatactatgctatggtagatattaagccacatgaaaaagtagaattctataccttttgacacattttcaagagtaataataacttttagtgactttcacagaataacaaaataagtattctatattctcccaaatgacaaaaataattgaaagctgaccaaatcgaatacatcattatttaatatttttaaattgggccagtagctgagtgtcaaggtagattagaaataatagagtttgatttagtaagattttctcatttaatcctgcacaatgggccacatttggaggacagtattgtcattgcattattgcaggattttaagctgctaataacaccccaactgctagctgcttcacagaaagaggattttccccctcacataaccagatatcttgtggtaggtgtccaacgtctcaggtcccaggtccaggggagtctgttgaccctcccgtcaagactgcagtgtgcccacaaggctgcagacactgtgcccttgtgaaaacatgttcaagggcagaaagcgggctgcagcgaaggatagagagcttcggcttcctcagtctcttccttatcagggaggaaagcacttttccagaaacataagacttctctttaatgtttcattaactaaaactggtttcatcccagaccatggccaaacctgcttttccaagattgaagctctccaccaagtgcttgaacaaatttctgtgtctattgtgttagagtatgtgtacgcatttgtgctggggcaggggagatggtggcggggagaagtgtggggtgagaatggcttttgggaattcattgaacagtgtctgccactggtaattagaattaatatctgaaattcctaatttaatgagggaaatctaccccatgttatatttaaatcagttacttggtcataaatattatgcttttggccaaagcctagccactgtatgatctcaacaagaaggacgaatggtgaggtaaagacagtcataggtctgtagcttttcaaattaccgatacttgcattaactatcactgtcaatatttaaatctcattgccaaagataattcatgtaaataatcagaaaagataccagttttattatgtaggattggcactatttcaggtaaagtatacccctctcccgctagctctctgataaaaattgttttaacttactttgaaaggaaagttccaagcttcaggttcactctcttttccattgcgtttgagagtgggatgtgctgcaaataatagaaactggaaaaaaggaaatgcctttcctataccaataagcacttcaagtaggttaataaaacagcccctggggtgtgtgtacaagggaatggatgagtcctgcaaaacatcagaaatcttgtaatgtcacagaacctaatctttgtgggcacttaaagcacactggcaattgatcacaatttcttcttctagttccttggagagatacaagaaaatcgacctttcaggacaatactaggctttctactagtatttaataaaaaacaattataccctttttagtaggaaatactaaactatcattaattatgtaatacataatctcagaattgtagcttaaaaaatataaaagagttatataatgatcattcctcttttgaagagaaggaaaattgtaacagatcccaaagcctcagatagtacagtgatatcaatttaatagagctgctggtatcacagaatcatttttttgtttttccttggccaaattatttccttcatgtaggacataccagtgttcacaattgtcccctgtcttaatatcataattacttggtacagcaaagatttatgtgaatcttctttcttgtaaaatacaaagttagtttctgtgcctgactttttttttttttttttttttttgagacggagtcttgctctgtcgcccaggctggagtgcagtggcgtgatctcggctcactgcaagctccgcctcctgggttcacaccattctcctgcctcagcctcctgagtagctggaactacaggcgcccgccaccacgcccagctaattttttgtattttcagtagagacggggtttcaccatgttagccaggatggtctcgatctcctgacctcatgatccacccacctcggcctcccaaagtgctgggattaaaggcgtgagccaccatgcccagccctgtgcctgacttctaatcaagggatatttctcctaaaagtaaataaatatttatttttgtgtgaaccctccataaaagatttgatttttataaataaaatataattctaaaaagaattactccctttaggtcatgtgtgttatatggtgttatttaaaatgtgcacattttaaattttggaaaaatgtatgctgaaagagctctgtacattttggtgacgttagcattttatctgagaccttacttttaggaaaataaaattgtttttcattaccattaataccaggtgaacatactacaaatccagatacagcatctcgtcacttacccagaatatgaaatatttaatgtcattcttattaagttaaaaaaacttttttgaacacttatgttctgtaagacctggtgagggactatatacacatatatgtaagtaatgttttcttccagaattcatgtttaaaaattgatccagctttctcctttgtctgcgtgcccctctattttgtgttaagttcatgtaatcagctacagatctatataatgcagtccatctgacactgcacacgtaacaaactcaacatgtcctgtccccaaacctaactccgggcttcccccgccgacttccttttttgttatcagtcatccagacttagaacttctcagcctgttcttcccgtcagtcagtcatagcattttccaaatcctcactttgtggcacaccaagctccagtactaaggttgaaaggacctatagccatggcaactgatcatcaaaacacagtgtgataagtgcatcagaacagtgttagctggttattctgtaaacattggcccctggcctggggactgtgagacaagaccgggttcctctcaccctcagagagctagtgttctcatggaaagacaggccttcaaaaagaaactgtctatctgtgtaggatttgggaccttggaggacagtttttattcaggaggcattattcaagtgctattttaaaaaaacgtgttcagtgtgttagagttgtacatccaaatgcccggctttccctcaggcttttaagttaattgtataagctttatctttctgtgtataaatctagcaaaatttaacaatcacctttgaagggactcatagcttaattacatttctttaaatagtttggtctttaaaacttcaatatattttatttctctttttaagaacttctgctgtctgacaaatcttcccaagtacttaactaactcttgtaaaaccagaaaattaaatttataaattgtggctcaaatgatctcttaatagccttgtaccatgtacataaacttaataaaattctcttaccccttcttaagaccacaaccctaaactcagttaccattttaaactggacatgaagctattctaatatatgaaattcctgtaaacatttcaagtatttaaaaatacccaatatatgattctctcatcctaaccgaaaaaataatgtttgattatatttaattctgaatattaatgaagataaaaatataccccctgtccccatccccccgaattttttccatctcaggaaacctgggttctctttccatgaaaatttagggttattttcttggctggccaagtctgtatatcagccaggcttgttgaggacttgtgatctggccttaggctttcctcaataacaagaaaaaaaccagtagagtcccactaatagtcactgtgtacaagcgtctgagtccgtgccttccaagtggagtagattcagtttacacattacctagttctcagcttgtatttgaatctgtaacctttacccatgctatttcaccactggactggattcaactatttaagccttgtctcttcttgagtggcagggctacaaatctgataaatgacatcagattaaactctgtgttcccagttctgattctgtccgacttcatgggtacaacactcaaatcatgctaattaaacaggtggctaatatgtgctgtgaaagaaacaggtaaggtaccactatagaaactcgggcggaagttgggaagagtacttattttaggaatttggggtggaggcctctctatctgtggtcacattgaaggatttgcaggtcatgctaatttgttatgtcaaggaagaagggtttgctgagaatagggaagcagggggtctgggcagaaggagcagcacttgcaacacatctcaggcctagggaggaggaggttggcatgtggaaaactcagggacaactacgtggccttgaagtcattcgttcaggggacatactaggtgggggatcagatccagcaccttgaattagtaacagttacatagactgtttacttgtagaagcctgtcatttattcatcccttttgttatttgcaaacatcagcatccattttgaccgctcctccacagttccttccctcttccatatttgggacactcttcccacctcccctcaccaataccatgtcctggacatcctgtgagagacccagctgaagtccccacctcatctatttgtctttcttgaccacgctgtatttagtcagttcttcttttgaattaccatagcagcttgtgtctgtctgtacttcaagactgccagtctggaagggatctgaaagataaagggcctggctcaatttcctcatttttccagctggtaaaattcaaaagaaaaaaaaaaggaaggcaattgcagtacctggtgggtggctttctccactccatcaaaccgcaccagaactgaccacttgctcttcattagcttttcacaccttttcttttgtttcctctgtatttcatgagtacactaacttacatggatttttttcttcttagcagcaataacaaataggcatagaatacatagtaggcatacacacctctatgcaaaattatccattaacactgaaggaatgtatctctggggaaggaaataaaaacatgtggttactagaaagtctatttattggatagaccttttaatgaaacaccagtttttaatgtactgtccgataaccacttttcccataatacagccaacttgcaaaaggagaaatttcatataaacaacatctgcactttggagagaggtggacacccttcctgtttgttcaggtccttaggaaagacagattacattctgcctttgggtactgtgaaatgtgattccgttacgatgtctaacagtctgagctttagaagcagtttattagacagtcattaagagaataattcagtcctcccagaaaaagtaacgtttccctggggaccgagttacaatgagagctctaccctccttctcccttcctctacatgtggtcttgatgaggcagctggggagatccctgtccctctgtcagctgcccacaaagctaagcctgttctttcagccctggctgacggtagaaagtgaggcttaaacagagagcttcagaaatgttaagcctgaggaagaagaggaagttctttagcttaatagtgattactgaattccttttaaatgtgataaatgactcctttattatttcagcgagatgctgtatcctatttttctattaaagataagccctatgtagttaatgtatacttgcagattgctgagagtagatcttaaataaaaataagtatgtaaagggatggatatgttagtcagcttaatttaataatttcacaatgtatacatcaaaacatcatgatatataccacaaatatatataatttttgtcaattataccttaataaaaaatataaatagactctagccctggctttgccactattacctgtgggaccttgggcgagttattttttcttcctgcctcaggctcctgatatgtaaaatggggtaaaaatgcctaactcaggctcatggtgagaattaaaggagaaaaatgcttatcacactaacacgtttgcacaactatagtatgtgttattatccctccttcagccatcccaagtaaagttaaataagattcagctacttttcaattttgatttaaagttttatatttttaattttgggcttctaaaaacaaaatgttctaaaccaagcccctgggttccacctccctgtctctctagttcaaaggtcaggcgccctccccctgcgatcctgtgtgcaagattgtcgactgggctctgtccgtctggcgtcagcttaactcctgcctggcccgcttgggcacacctgaagcacttcttggaccaaaatatttcctgtcttgtcctgtagttcctgggcatgcccaagtgacagtgaagtaagtgccatttttccttatctttctgcttatgatagagacgtggccaattcagatgtttgagggtgagaatgctgaccaggctgccttgtgccacctcctgtcactgacacggagtgccagtgctctctgctctttcagaggatggccacagcttgcctactgtgtgcttcctagggcagctgcatttttgctgagagctaggtttttcctctattagaaaattctcatccaagttatgtttggcttgctatgcagagtctcctgagtgaggtaccacataagaagtttcatcaagtattgtatgcacaccctccaaaaaacctgcattctgttaatgaattgaaaagctttccctttattgagacatatgttcagtacttactgttttcctttgaagcatcttatgagaacagacatatatacaataaggttaatgaaatagaaaatcaggagaaagttgaaatgagaaaaaatttgttaccatccagtttagtaatggttctgtgaccagcaagcagatttgattctatagtttctggtgccatgggcagaagtctattttggaaagcaggggatagaaataatatcttcttagctggatgtagtggttcatgcctataatcccatcattgggaagttgagaggggaggatcacttgaggccaggagttaaaggtcagcccaggcaacgtagtgagaccccatctctatttaaaaaaaaaaattagccaggcatagtggcatgtacctgtagtcccagctattgagttgggaggctgaggcaggaggatcaattgagcccaggaggtcaagactgcagtgagctttgattaagccaccgaactccagcctgagtattagagcaagaccctgtctctaaaaagtatatgtatattttctctattgtaagacaaaccaccatttttataacagctaattggtgggaaagaagtactatattaaatatatatttagaattttgctacaaaataaatacacttattgatataattaccactttcttcattattatgtcagttaaattaaagtcttttttacatccagagtctcaagattcttaggaatcatttttgacctctcctatatggaatatagtctttgtcaagaattatggaggtcccaagatttttaccctatttgcaagctaccaagttagcctgccatggttcaggatgctgagttagggacacagcacttcatcacccacaacacagcaggcaggcagcctgagcttcacttttacatagattccctttatccctgaagccccacagggtgatacatagtagcccatgtggttgctggatttgcctcaacagctgtggaactccccccttcccatccctccaaggtttctaaagagggatgctgcaactctgtcgacccttggccctggaagatgttgtttttattatcctgatcaggaaacaattctgccctctgatcctgaaggagacatttatctctgtcttccaagactgaaaagatagtttagaacaaaacctgacaccagatgtgcagaaatgctgcagagaattgtctaccaatggctaagttaaggagttgattttttttttccgaccacagcttatcatatttatacttcagcacttttaggaataactgcataatttcgattcatgctgtagaataccagaattttgtctgtgttcccattcgtacttttatttttcccccgattgtgtagcactagacattaagagagaaacttaaaatagatggatcatagtttttgacaattcttgaaagttttatgcaatgtctaagctttgaaaacattcctaacctgggagatgtggttttgtttctatagcctttaatcatataagtgttttttaatactgcaacaaagcataatctttttttgatggaattttaattggcattgagtgctgcaaatttgggctgcagtcccactgtttatggctattaatgcaaacagtccacctgaggtgatagctgattgacccccatcctccctatagaactgagcccacccacacgcacccttgccttgggacaggcagatttaatttgccggtgattatacatcccaggctgggtgcggtggctcatgcctgcaatcccagcactttgggaggacaaggcaggcagatcccttgaggtcaggagttcgagaccagcctggccaacatgatgaaaaccccatctctactaaaagtacaaaaatcagccaggcctgttgccacacgcctgtaatcccagctacttggaaggcagaggcacgagaatcacttgaacccaagaggcagaggttgcagtgagccgagattgcgccttggcactccagcctgggtgacagagcgagactgtctcaaaaaaagaaaaaaaaagtatcccaatttcagaaatattacaatacaatgtatgtgcaccttattaaggagatgtaacaaagaagttgaagctatttagacatggacttttaggaaatcttttttccagattttttcagtctttaaatttaccttcctttcaatgtgtttattcatgcatttattcactcagcactcaagcattgattctacattgagagagacatgtaaacaatcagtttcatttgaaatacagtgtatttttgaggcagattcaaacacttttgtattgggtaatttcacttctttgaaaactacctgggaaaggtagcatatctatagaaacacttaacgttttttccccatagtcttcaaactgtcctttcacggaattgtgtataattattgagaagcctgctcctaagggatgaatcggtccctctcctgctaggtggatgtctaagctgtggaatggcgtcatcgcacccagagttcaagaagcaatattgtcaagagcctctgtgaaaagacaacctggctttgggcagacaactgctaaaagacaccctagccaaggacagcaggctgtggtcaaagctgctctcagcatcttgctaaataaagctgtactgcatggctgtcccctccccagagcaggtatgtgggtttctgcagagaggagaggaaattcacacccttgtgaaataccttttaaaagctgtttttagagagctttctttctttgtaattagaaaaatatacatcttatagcagtgttccagaactgtgattttaattactggttaatgtttgaattctagacctccaagtaaagttggtgctggttcacaaaaccccagcttggatactaaataaatgcattattttgaacagtccgtatctttgagaaacggaaatgtattttgctttaatcagtgaaactgcattatccctgctgtgatttgtgttgtttcagagctagaccagcatacagctgatttcaaaggaggaagtttccctttatccatagtttccagttataacacttgtaacaagaagaaaggagagagtggtgcctggagaaaggtgaacaccagtcctcgcaggaagtctggccgcttctctttacccacctggaataagccagacctaagcactgaaggtaaagggcgggggtaggcatgttgcctaccaggaggtggacatacgtgatccagtgtctgaaagcaaatatgctttcatttttatcacgatgcatttggtaaaacaaagtttaagtattttaatgcacattttcatggaataaactatatagtaggtacatttccaaaaatatacaggagatctctacctgaaaaataccgctttcaaaccagaattccaaaattaatctttaacttgttaatggtcatttatttattattttgtttctcttggtgttcacaatttgtataatcattgcattattacataataaaatcattggcatatttctccattatgtcactcctaagttaatcttacattaaaaaaatatgtgtagagacatatttgatacccatttaaggcctttccaggtgaatcaggtgtacacatttctttcttatgtatgacgtgtaccatgtgctgggttttagtctaggcactggaaatagagtggtaaaaaatatatatattccggccaggcatggtggctcatacctgtaatcccagaactgagagagaccaagacgagtggatagcttgaggtcaggaaggcgaaaccctgtatctactaaaaatacaaaaattagctgggcatggtggcgcatgcttgtaatcccagctactcaggagcctgaggcatgagaattgcttgaacctgcgacacagaggttgcagtgagccgagatcacaccactgcactccaggctgagtgacagagcaagactgtgtctcaaaaaaaaaaaaaaaaaagatcctgccgtcatcgagtttatattctaataaattggacagatttcatatgatgggacatcaagtgaaaaatatgtaagctttcattctaacaaagaagatgtaacacgtctgtatcttctggtgttaggcctattccttttggcattgataataagataatcagctattatataaattataaatgtctttcccaaaacaaatccaaattggaataaaaatgaaaagaaatttccacctcatgtgcactgtggacttcagattatgtcattcattttcctcctctctcaaagtatttgttttgtgaaattttatgccaactttatagcagtggggtttctaaatgaggtgcttaaaatcttatatttaaaaaacataaagttgcttttagttatgagtatattttcatttttaagcttgtattttgttaattttaataaaaatttaatgtttttttaatcctatcaatatatgctagggttccccaattaccctaagtgcatgatagcaaattgtgacccctttttaagtgactgaatgaaaatttactgaataaaatgaattttcttatacttttaaaaagatcagtattttatattgataataagatactgttttgatcttaagagcttgttattacttcccagagttgtcagagtgtttgatttagggagtaagaatcactagactccagcccaccaatttagtatagacccccagatgactttctgtagcaaggattatacctttcatttgctcttagtcctttcagtatgcaagaaagctccaagacaatgataatgatctccatttacagagaataaaactgaggttcagaaacccttgggcacctgctccaaatcacctctcctggaaatatgcggttctgtaattgtttcttgcaagcccagtgctattttctgtagtccacaacaccctgatcttattagacgtgcagtgatctatgggtactcagataactggacacccattgaggctcttcactgtgtcatttctaagtttattagaatctctataaagtttaagaccaactttttgagctaacttaattgttggtatatgctttagagtagacaaacagaatcaacaaaatgaatatgaatttaaagcagtatcatggaagagtctggatcagaaaactatattacgcttaaatgtaaaaaaagatgaatagacttgaaattatttgtatttttaataattttagttttagaactatttgatatcaaatgttatattctttgaagcatgaacttctttgacagaataaaactacaagagtttacactgacttcaaggaaatttctaaaagttaactttacaaagtatataattcatgagtcagtagttgggttagaaaccatgactgacatgcctctcgttatttttataatggtaaatttttccaataattacactgtatatatgattattacaatggttggggtgactttggttaaaaaaaaaaaaaaaaccaacacaggaatccttttgcatgcagatcactatggaagcttatcaaatttgataaagagacagcccatttctttcctgacctaaaacagaaaggccaatgatgtcagatcccaggcttttagggcagagcccaaggctgtgcgctatgtagtaattagtagaagccactagtcagtgctttggacaataatgacagaagtatgactaaagaaactcgacagtgattttctttgatctgcttttaatgaggatatatttacttttccaaaacattctttagagaaaatttgtgttgacaacattaatatttttagaattcactcaaaagcaactgttttaatgcattcataacattgagtctaaaatggtttataagagtgtttctcaaacttcaaccataacccattgtgagaaatacattttacaccatgatctgtacacacaagcctctgcatttgtgtgtatatataactgatatgcatcagtatacctccagcaagaaatacaggctattttctctttttttaactgtgtcataatctgcagtttaaaaaacatatgattttcagcatttaaattctatgactttttgtaccctgttcatattttctcttctgtataatgcaaaagctgttaaaagttaaatttctacaagtacatggctaatgccacatatcaaaaactatacttgattacatagtagtgttagaatgcacacaaaggtagagaaagggtgattaccatcatcaaaaggcaggtattaaaatcttcttttggtcctttgagaacaagggcctaaggaactagggacttgactaaagagaagaacggccatccataaaagtgaaattcaggattcttgacttgagcttcaggtagtgttagttgtaccgagttccatcaaaatgtactcgagggagttggctattccttgactttcccacagtgcctctgcaggaggctatgcccagagcctctgtcctggggaaaatctcctcaaatcctggatactaatccaagaacagtatgaaagtactgcaaagtccacagtctgtttcttttaaatacagaattcaagaggcacagggataatgatctattgaaaatggttctcttttttaacaggtatgaaaaataagactatatcacagctgaattgtaacaggaatgcttctctgtcaaaacaaaagtaagttcccctttcaaatttaactcacagcaaacaaagataaatcaagtaacttcaattactattttaaatgttccatgttctcatttgaatgactattatgttaatatggttttaaaaaagttatatatgtcattcaaatgctgatattaaactgaaatctaatggtgtctttggataacgtctaaattgttcgttaagattaatataatgcaatatgaagactattttgcttgtaatttgttgaataaggttagaaatattataggtttcatttgatcaaattttgtttatgcatttgtgaacttttagatagtcattagatgacttttccacagatttacagaaacagtatgacttttttcttttttttggagacagagtcttgctctcttgcccaggctggagtgcagtggcatgatctcggttcactgcaacctccacctccaggttcaagcaattctcctgcctcagcctcttgtgtggctgggattacaggtgcctgccaccgtgcctggctaatttttgtatttttagtagagacggcgtttcaccatgttggcctggctggtttcgaactcctgaccttgtgatccatctgcctaggcctcccaaagtgctgggattacaggcgtgatttttaagtgctataaatttacagtgataatttattatattgttcctaagaaatagactatttcagcttacaaatatcaaggtataaaggatgatttggacaattatagaaatgtttaggcagtttgtaaataggtccccatgatagcccaataaattgtgtgccctgtcacttggcatgtaacatttaggatcatgtccgctggtttgcagcattacagaagaggggagggtaaagagagagaagggagatgaaggaaactgcatggcacgctattttctgccaggaccgcagctagatccatgacctgcaacagcctgtatcatttttccagcaaccctaggatgtacacataagggttatttacagaaaagggaacccaggaactgaggtgttaagaaaacctggtgcatggtcatattgctagctagcaatagagccaagtttgaaatccgtgtttgtcccattttatcacattgtcccctatgccacagtgtttagcatcctatctggcctgggagacaagaaacggcaagaataaggagcttggaatattgtacatcaaagtgaagttctttgtgaaacaaaattttatcctctcaagaattttgagtaggagttaccaaaatcctgtggaaatttcttgcattaaatgacatttatgaaatactttaaaggctattaaaaacattttccctaccccacaccaaatcccaaaaaaggtacagtgtctagatttccaaattgggaattgttctcactttgaaaaacgtttttctgaactttgtgttaggtctttagagaatgatctatcactgacgttgaatttggatcagagactctctctgggttcagatgacgaagcagatcttgtcaaggaacttcagagcatgtgctccagcaagtctgagtctgatatcagcaaggtgagcagtacaaatggggggcattgaatggctctactcaacagctgggagacttttgggggaccacaattccctaaaagaaattccttattgatagtatggttaatgatccaaatcaaaccatccctcaccttgcttagaaaggccgtttcttcctaaatatcatttatacaataaaggagctctactttgtgaagcctgcttttccaaactcctccaagacctgaagttaaaattgtatgttaattgcattagtacaagtcacatcaattcatttgggcagcttttcttttttatttttggagatggagtttcgctcttgtcgcccagactggagtgcagtggcgggatcttggctcactgcaagctccgcctcccgggttcaagcagttctccctgcctcagcctcccaagtagctgggattacaggtgtgtcccccacaacgcctggctaatttttggactttttagtagagacagggtttcgccatgttggtcaggctggtcttgaactcctgacctcaggtgacctgcccgcctcagcctcccaaaatgctgggattacaagcgtgagccactgtacccagcctgggcagctttttatataagcctaaatttgagtttcctcagatatttttcctttccacattcctaactttggcatatcagtcatctatcagtaagaaaattataacaagcatcacagcagacttatgttatagaccaagcaacaactttctttgcaaatgagaaaaagaattagcttgtataatgcatatcatcataatctctaagctgtgaaatttgagaccaaatatggaaaacagtgacctgaaatctcacagaaaacatggacagcatcaagttcaacctgttttggcactctagtatctgcagcaggtttcaccgagctgccttgatagatgccttatgagtggctgtaacgttcagcttcccctgagacactcaactgtattatttgaatcgtcataatatctacgacaaagtagaattcactcttatttaactttgttggaaacaaagtatatatccactggaaaagtaaggtaatgattaaaatcttgcaaattttatatcctttctttacttgcaaagtgccttttttttccctagagagttcttctggtcttcttttgacgttttaagtggattctttttccttagaggatgtttctcatgcatttgctgtcagttttacattaagacttgaagtctttctttcatgtgaacagttcaggacttgaggggcagggaagaggataagagtaacacttctgctgtgatttctccaccatttagctgtgccttgagtatgcacagtgtgactgtggagacatgaccgggcaaattctgtattttctagattgctgattccagggatgatttaaggatgtttgatagttctggaaacaaccctgtactttcagcaactattaataatctgagaatgccagtgtcacaaaaggtaagtgtccctttctccccaaagtgaacaaaggatgattgctgtggaattgacttcacaaatcatctttcagtgtgaatcacagagttatttttttaaaccaaagctaagaactgagaaataggataaaggtaaaagtgttcattaggttttagaaagagtacttatagaatattttggaaaaaaatgacataggaaagcattacttttttcccttcaatttgattccaaaattttgggtgtctgttgagatctccatgtttttttttttttcattttatatgacaaaactagaaatattgtagttctgccttatcctcaggtgatgcctgaaatctaagatagtaccaaagtttatatacactatattccttcaatccgataacctagagggctactaagtggtcagtgtgtgggtaatgtagacagaatgaataagttgattcacatccagggcagaacagagtaggatggtgcaagatttcatcatgctacttagaatggcctgcaaatttatgaattgtgtatttccagatcacagaaaacaaaattgtggatgcgggggtactaaggtaacaaaactgtcatcttggttgttcctaaggtttcctgcattttagaaaattagagttaattataacaaaacaaagcactgagtgataacataaaggtcttatacattgcaaaaaaaaaaaatctcaattttatttcatcctgactttccataacatgcattacatttcaatgagactttaaaaataagtctgaatggcaactagaagaaccaggattccagtagacttccttaaccttttgaaatagcttccatgactacagcactgcaccattatcagttggttaataaatggcaagagctggcacagcatggtattcctgggtgagcagaaacaatgagaaatgtctcactcattagttgtgaggatgcagacttcacagaagcactttgtaatatatggtttgttcaccaaaccatgttgattgattgtaagccaccttgggagtagatgagaacggcaaagacctgtgtgtgggtgggaaggtggggcgcagagagcaggattataaagtaagcatggtgagactattaagttattaagctttatctgatcacctagcggcactgggccccacagccccgctccctcactgcttcattaagttttgatcctggctattacatgtggaactatgtgagctgcatgcattgggagagcaggtatgggagtgggaatttacacggctgggggctctaatacaaaatatttaacatgatgtcctgtgaagaaaagcatggctttcaagctcactctatcataatgtctgcctttttttgttcaactgggaacaatttagaagcccagcaaaatttggaggatgacctaagaaggtgacctggagtcagcactgagccttctggttggaaaacagtctagggcccatccctttgctatctttaaagcctcaactcactccccctgtatttattggcttgctctgagctgtgcttgactggacgccagtctctaggacccaagaatttaggattccttgtggaacatcgtcagtggaaggggccaggaggatcttagcaagaggaacagtgaaccaccttccccataagcccaaatcactttcttgtgtaaaaatagagaatggctgctgcttaaatgtctaataaagaaacaaacattgtcatacccctatttctctgtcacatgaccatattgagttgctacaataaggtactgtccacaaaaaaaaagtagtactgaaagtcaaagttctgggcagctttgtttaagatattttttaaagcgagtccttttatactatctgggctcttatacaaagaaaaaaaaactatgttattgtttaaatgtgcaatttgatgtgggaattaggaccgctgcctcctagtcttctctccctttgcccactgaagacacttatttggagggactcttccccaagagctagatgatgtttttctcagaaagtgccagcagagggcaaagtggtacttactgttggcagccttctgaaaccttgactggctgatgccttttctcttctcctactcagctggtatttctgggttagatgcccagtttcttctgttatcaggaagtatctccatttagaggtaagagtttcctgggttagttgaaatcactttctccttcatggccagaaggctggcaatgcctccattgaagaggggccctgcaaccatcattatctgttggaaaacaaaaatgagtaagttatctttattatttgcaacaatataactcctcactgctctaacagtaagggagagtaattgggtttactaatcaagtggcatttagcaggccttctgaattaaaaacaaatatacatatttaaatcaacaggaagaacaaatgttaataaatgttttccttttatgtaaatccaaactaatcctctgaaaggacaagttcacatctttggttgcatgatgaaatccacttgaggcttcttttttttttttttttttaacttcagggcctggactctagtctgaggggaagcctggacaatgggttttttaaaggtccctggtgattcttacatgcatccagggttgagacccactgttctaaaacatagccctgatctgtcatcttcattttccacccatttctttctttccaaatatatctttagagggattgagatgccttcatgtagcttttcacatgttccttttttacatgtaatttactacttccctctgtactcctccccatagaaccttctctcgtcacagtcctgtgcctctttaaagactcacccccaatgccaccttccctacatgttgttcttttcctcctgcccctaactttcccatctagaggaattacaatatcttcttagcttctagtagatgctgtgtattgaatgaattgctctgatttaccaattctttaaggctaaataaaacttactttaggtcagtgcctttctacacaaattagtttttgagtttaacatgcacagcaatatggatagtaaacgttatacatttaatacagataattcgggggttttagcccaggaagcattaaacacctgtaactctcctgctcctaaactccgctgccccctaggcttgacttccagggtgtcaggagcacttttcaggcaggatgctgtgcattggtcacctgctctattcttgcactcctggccttgaattgctgtggctcacgctaagcccaagtgattctccatgttctcatcctaactccttccattctagcctcacacttccagggactgaccaaactacatgtttttagttgttctgggtacttctcagtactttatttcatgtggatatttcctgcctcagaccatgaaggtacactcccctcaccatcatgttgcaggtacagaaacagactagaacagtgtatgtctcctttccttcctctgggccatggcattaattaactctgtagatttgacaataatggcaaaattaaacaactcccctcaccaccagattctgtatagcaactaactgttatccttattataatgccatatttcatgttttctgaatactacgtatgtgttgcatttgctggtgttttaaaccaaattacaagttctaattggccttagtaggcccatgaccaagtcccattttgcggacttaacagtaatttcttgttaggaaaaatgagattggatcctggtacctgcactgtttttacagttgtgactatcaccatccaactcatgacaagcaatgtaacttctcattttctttctggtaacttgacagcataagcatctttacaaaacaaaagcagaacatactaagcagattcgcccttaacataccatcaagtacacatggaggtgacgaggatggactaggatgtgttccctcaccagatgtagctcagcctttttccaggcttcctcggacgtagttaaaaccgagcccatctgttttttgttttatcaggaagctcttgcctttctaagctagcttcttgcagtctagacttctctttcctttccctgtaaatgcaggtggcctggaccccagatttgtcccctctttattctccattacatatttgttgtttcagtgtttttatattttcccaaaccactagccaagtatatattagagttacattgctgttccacttaagattagctgagtctgaaaatctgaccccaagagatttcactttggtgatttaggggtagtttaatgaacatgttgtgttgggctttaaagaattaggactttaacagggaagtaaaggaaaaataggatttaaaggggattggagccaaactttaaaagaactttagtgacatgccagttagtgaggacttatcctttaccttcctattcacacaaacacagccataattctctgcccattttgtgggtaacattggattaggttggtgaggagagagagaaaggcagctgctaaagataactgaggatttcctgctaaattcactgggagagcagcattagccagtaatgagccaagcggaaaggctttagaaattagtattgaagaaatgcaataaatacagttttagaaagaatttgaagtgtggctagacatataggtgaattagtggggtggaaatgcaggagataaatgagggctaaagaaagaactttgggaaatacttagagcttgaaatactctgaagggaaagattatcaatgtgtgacttatagagggctaagaaaaatgctaccatttaggacagcagtccccagccattttggcactggagactggtttcgtggaagacaatttttccacggacctgggtagtttccggatgaaactgttccatctcagatctttaggcattagattctcgcaaggactgggcaacctagacccctcacttgcacaattcacaagagggtttgtactactatgagaatctaatgctgctgatctgacaggaggcggagctcaggtggtaatactggctcgcccccgctcacgtcctgctgtgctgcccagttattaataggccatggactggtccacagcctgtggcttggggacccttgatttaattgctcaatggagaaaaaggatagtgaggagttaagctaggcgttctttggccgcaagattttttaaaatcgtatgtccatgccacaccccagaactattaaatatgaatctctggtaatagggcccagccaatgactattaaagctcccccaggtgattccaatgtcatataagacgatacccaggagaatgcaactgccgcaactgccagatgaagccagatttttcctgttaaattttagttttgttttaaattcttgtaatggttatattgctgttgggtgcattattacttttgaagaggagaagttatcaaggtcaactccttcagaggcattcagagtaggtcacttagtaggagtcatgtcatgtttgttagtttgcagaatttaatgcaatatagggaaaataccttgagtgaaagttgggagacctgaggtcttgtcccagcttcaccactccgttcactgtgggcaaatcatcttacctatccagctctcagattcttcatgggcaaaatgagagacattgaccaggtaatcacaggatttctgaaacattagagaaatgagaacatgcagcttccaagtatggaagatcttgagtggcctaaccatagatgaatgtaggttctgctagggaaggaatgtttctcttatgttttctcctatatgcccccagattatttgattattgagtaatagttcacttttaagacttgaaagtagaaagcagaaaagttaggtgatttacccaaggtgacatagtttgtagagctacctacaaatgggactactccaatttggtgatttcctcatgcctgtaattttgtgaagtttctgttggtaaggagatcgacgccttagcacttgattcactgactcctgtatttaggaattttgtaacagcagatggattaatgaaaatcatgcagtaagtctataggaaattaattactcagcttctcctctccattttcttttgatttttcacgagaacctatagttttagagagaaactcctgtacatttgctcaaagaggaggcaggggtagggctcataacaggagaagtttgtgataaacttgtgtggtttcttgtctcttacaggaggtcagtcctctcagcagccatcaaactactgaatgcagcaacagtaaatcaaagactgagttgggtgtttcaagagttaaatcttttcttcctgttcctagaagtaaagtcacccagtgttcccagaacaccaaaagaagcagcagcagcagtaatacaaggcaaatagaaatcaacaacaactcaaaagaagtgaattggaacttacacaaaaatgaacacctagaaaaacctaacaaataggcctgcctacaatattctcattattaacttcctctatttcacacagaaaccaaggacaacaagatacaaatacctttaaattgataaaatgttttcactgtaatataaattatgagtgcgggaccactattcaatttttttttgtaaagaatgtatttataaccaacattttgttgcttttttttttaattctgtaggattgaacttcaataccaggaagttatgccaacttttcaagtagttttataatagaaaaattgtaatagttttaatcaagatgttcaggggtattaaaacagaactgtgtactgtatatctgtatatatgtatatatgtatgtatatttaaggaagtccagaaatcatactgcatacatgctacaaaaaagtagcaaaaaagtacaaagttggcttagataacttgtaccgttttaaatggagatcataattttatgttcacttgatggggaatgactagaatggggcaataacaaatcatttctaaacagttattttccattaaaagccatattaagtattttgcttgttaaattctagttttatgttttaaatctcttagtggttacattgccatttggtagcatcatgtatatatttatgcttataagtttgcattatgactcctgtaaaatatgaaattataatgcaataaaagtgttatctttcttacaaaagttttgtacctaagtggatatagataactgcataaatgaataaattcagaattaactccttcaatatttctagtagcacaactgataatattgatattttctacaaatgttacttctaaaattacagacaaaattacttacacaattcagttaagatgctttgacactgaataaaatattgatttcatgaaa

SEQ ID NO: 282 - DNA, 103068 bp, Homo sapiens
cggtgccacagggacgaggcctggagagcagtcgctcctagaaccggggcgcgaagggcacccccgcctccagcacgcgccctccgccctcccggcctcgctccccccggagtgggggcctcgccggcccctggtccccgtcactcagcaacgtcgggtcagccttcgccgggttagtggcgacgcggccgcgcgaattcgcacaggtattccgcgtttctccgccgttccccgccttggccggaggcttccgaggcgtcccttggtgcagggtgggaagcggcccgcgccccaacggcccaggcgctggagctcaccccgagcgagggcggtacctgaggcttcggggagcccgcgctgaccgcggccccgtccccagacccctccagcaaccccggccccgccccagacccctccggtgatttcccccccggccccgccccgcagatccctccagtgatctcccccccgccgcgccccccagacccccccccagtgatttaccccccggccccgccccacagacccctccagtggtcccccggccacgcgggctccgggggggcggggcgggggcgcggccctttgctgggacagggggcgtgggcccgagtagcgggcggggggcgcgggcccgggctggggcgggggcgggggcggggagcgcgggagccccggtgacgcagcagtgacgtcggtggcagcgggcgggatttcccgggcgagaccccgcggcggagtgggcgcggccagcgtggaacgggggcgagggtcgcagagtcgccggctctcccttccccagtctgggcccccacggcacagggggccgagcagaagcccccagcgtccagggccgggggagggtccgcctgcgcccccaggcccgcgtggtcgggccctgcagggcgggaggcgcggcgcggggcggggccggtgacgggacgcggagaccccgcgggcggcgggaggggcacgaggcgcgcgtttgcacccgagcccggcccgcgccccgatgcggagcgatgccgctcggcctggccgccccccgcgagcaccgcgctgcagacgaagcccgcgcgtgatcccgctccgggtaagtgggcgcccggccggagccccgggtgtccgcggggagagcccagcccggtgcagccagacgcggaagggaaactcggggtgaaagtctccggacctagggagacggctctggcgccggtgtggtcctcacgccgccagctgctgctgcacgcgacacaaagacctgtggttccctcggcctcctctcccgggacctcccgccgggccccggggaagcccgcgcgcgggtgtggacagccccctcggagcgcgtccaggggcttccggggctgggggcgcccggtccctccggcatgaggcaggcgggggctcgggggtcccctcttccatttgtaggtcacagagcgtttgctgttttcccagcggggacgtcccccgtggaaaaggacctcagtggcaggagatggcgtggctggttgggcgttttctttggggaaatgtttctggcgagtgcctgaggaagccctcctggctccccagcagcccagacgccgcctcgggagcactcggggtgacgctggagccaccgcagctgagggtggttttcctcacctccttgatggcgtctgtccccgaggctggtgctgaactgaaatgtgcttcgttcgccgcgcgcgcccggcagcaaccggggagctttgtttggcttgattttttaaattgccttggaaataacgcgaaacggcgggagggtgaagtggggaggaggacagagcgtggtggggaaagactccttaatttaagatttgcttcatttcgagtatttggggctaaggtgttaggaaacccgaaaatgttaaagtttgatcaagtaataaagtggatgatggacgccgggcctcccaccgtctccccggccccgcggctgccgcgtctctcctctacccgtcgcctcccaggactgtcaaatgctggcaccgggcccgtgcctctcagccggagcaaaaggccgcctaggctgcgcccgtgtgctccattaaaacgtgccagtcctgtcgtctgctcatgagtgaggtgtgccgcttcccacagtggacaggaaatttgcagcggcgaatgcctcacagtagccatgggggacctgggctctgcggccggcttctcgattcctcccgcaactccttttcctgatttttgtatgaggcgggggaggggaaccagccgccatctgatctggccctgttccctgcaagaggcgactggggggacaactaagttgataaatggaaagccttttccagcccggagaaacagacagaggacctataaactggattgtttttgaaatgtagggtttgctcagtgaccggtcatgataagagatggctgtggcacttaataaatagtaggtgtaaatgcaaatgcaaggtttacagtgatgccttgcctgttaatgagcagcctcaccatggggttagttaggctgaaatgactatttaggacaatggacttcctgttggcccccacctccatgcacaactccagtgctcataggccttaaaattcgcccaaggaagccagtggaggatgtaggcctggctcagaaacagcacagctaaggggccattcccagcagtcctatgattggcgtttctcatgcaaactgatggtggagaaaccagaaaaaaaaaaagcttttcctagattcactttacagtttttaaagcaaaagtgacagtccctgaagtcccccaatattcagtgcattctttgaaatgatagaacatcaggtgggaacatcgcctgtaatcccagcactttcagaggccgaggcaggcagatcacttgaggtcaggagtccgataccggcctggccaacgtggtgaaaccccgtatctactaaaaatgcaaaaaattaggcgggcgtggtggtgcacgcctgtaatcccagctacttgggaggctgaggcacgagaatcacttgaacctgggaggcagaggttgcagtgagctgagatggtgccactgcactctggcctcaaaataaataaacaacatgaggtgggaacatggaccctgacccctggggaagcaagagccacagctgtctcaggagggcaggaacactgtaaaatgtgtacaatgctccttcccccaagacctacacgcccaaacccacgcctaccacaaaactactgcttatgcagaaagcaaagactaaggtctgtacccaacaatttcttcttttatttatagctgcatctcacttatttcactatcacatttttcctagtttgtctcagtttctgcttggagaggggagaatgcctaataatgtatgtcagaagattgcccctttcttcgtggaattttgaagtagtaactttaaaatattacctgatttttgttcttgaaacaccttttaaggatatactgctatctaatcttgctggttttccttttttaaaatttggtatttttattcattctagatatacttaggcatagagacttgtattattcaggtagagagattgtttcttttttaaaaccagaaaccaaaatttaactcctttaatagaggtataagtactacataaataacctatcaacagtggatagcaaggatattttaattgaaagtcagaaaagctaaatggtatcaggaaagaaaaggagattgcagggtaatactaccgaaagactgaaagaagctggttaaaaacctctaaagaataagccaaagactgttaataaatgatcaaaagtaaaaacacaaatgaaattttcattttaggaaatgttaagaaataggggctagaaaagctgctgaaagaaaaaaattactgcagagaaaacaatgggtgcttaaaaagagatcagttcagtgagcttgctggagcgttccaaattcctctaattgccaaggagttcttgttagactgaatggtggctggtgggcaatcagattccctgctggaaattggtagacagagtgacaggtgccatgcagataagggaaagccggctgtgtgcaagacgccgtgctcactggggaaggagccctgggtgcccaggagtgaggaagtatagggagctatggaggaactgttcgtctccatggccgtgaggtttgtgggtcaccaaaggcccagtctccgaggatcggatagggctaggagcccaggttagtgggcaacaaggggaaagaagggcaatgattgggctagacgtgtcatgtggatgatctcctttgatactcacaggatacctgccaagtttctaatttgcaaaaaacagcagtgactgcttgtgtcctctctgtccaggagtgttctggcagcgggtttggtgggtggtgggaaccttttttaactgatgtaggaaaagtatacacaaatgacaagtgaaagtgacagagacgtgtggaagagaaaaaagtggagaactgtagagagacccacactcaggcactgcacatgagctcctttcccaggaggatttgtttctcttgcttcttagatttctaaaaccatttctctctgagttgctgggttggctttctgtggtgtgacacatgtgctctgaggccatggaaggccctagagatagaagaagcactctaagtatccctctgggccagagagattgtttcttccccaacaccccctgtgcatgaggcgggacaacagccacgatggatcatatgagctggcattaactgtgcctttatgcctttctcatcagtgcctggacctcctcctggtgcccctgcctaatgtacagctgtaaggccttgtcttctgtcccctccatatgggctccaacaaagaaagagaggcagggcgataaaataggaagaaggaaaacatttttaactctttttaaacattctttttttttttttttttttttttttgagactgagtttccctcttgtctcccaggctggagagcaatggcacgatcttggctcactgcaacctccgcctcctgggctcaagcgattctcctgccttggcctcccaagtagctgggattacaggcatgtgccaccgcgcccggctaattttgtatttttagtagagacggggtttctccacgttggtcaggctggtctcgaactcctgacctcaggtgatccacctgactcggcctcccagagtgctgggattacaggtgtgagccaccatgcccagcctgaacattcttattcaagcacctctacaactacagcagaaaaagtgtttacatgttcctccaaattccagcacccaaactcaaccttgtttcttctggtgtcccaccacacagagaggtaaaattgagagatttctagcaaagcagtacccatgtatgaaggcccaaagaggagaaatgagcttagatggcgggaagaaaagagcaagaggctgttgagattggggtgggaggcagggcagggcagggaggctgctgagggctgagagcaggttcttctccacaatggcccagcaggactctgtggctcaggtccagacactgatgaacaggaagagcagatggggtggtcatgccccatgctgggactctgtcttcccagagggtcaggctcttggaggccagaggccagaggtcaggcagcagtacaggcagcctggctttgcaggctgagccaagtcatcaacacaccttggaaagggctacgtgttacccttcaacacccacacgtccacgtgggccctggggtctctggcggcccggggcccatgtggacggagtgtctgctgctgcatctccccttcctcatcagtggtctctgtcttcccatggctccctgtctataggaaggtccagctacacccaacaactggcatcctcctcctggatgtctctccagcccgatctgaggagccatctgccctgccctgcggctctggggtacccgccctgcacagaccctggatggaaatttccagcagggcctttccgctgcccctagcctgtggccgactaaacgagcatgagtcagtcctcattcggttttagttttccttcagcaatcttgggaaaattctgttttctctgtgccccagttaactttgcgtatcactcagaagctgctctagtctgaaggtgcttgtttatccccccggcagctgtggggctgcatggcagggtactaggggactgcagcctggttaaggagacctgatgacttcagtctacaccgtgcatgtgtttgacggtgtgtgcggggaagaaggtgttaccaggatgagagacagcgtcaggcttgctcatgcccaagggcagtggtgggcctggagtgtgggtgtggaggtggccgaggagggtcgctcggtggatgtgagtagaaaattccaaaatgttgacctcaagggaaataaaggggaactggcagtgttgccggccactgaattctctctggaacagggtgaggtgtaggtccagggcaaggccttcgtgggtctcacacgctccctcccgctgtggctgaattttatctgatggagacagagtcactggcctcttttgctgatctggacctctgggtgcccgcgttcccgccacccagccctgtctctggaaggctgtacccatcaacctttcagtaggagtttggcgtttcactgccattcccctccacttggttgaccttgtagaattgtgccttttggggactctctcgggcagatctttctgtgtgtgctccgtgaacactgcagcaagtgtgccctcagcccctgctctgccgcgtccccgcctttttgggttggctgtgctcactgatggatgggtcagcatcctctgaacaagtttctcgttagaccctctccttgtgctagggtttgttgcagtcaatagtgtctgaaagaagccaattgctggcctggacccaggcacgtttttattcatcagaaattttctttgtcatggatttgccattctagggctctgctgatctcactgtgatcttcctggtgtttttagttttactgtccagtactgctccccgccacattccttttcattactgggtgctatggaaggacttttccaatacagacatactgctggatgcgatcgatgtgttcatcgaagactgcatgtgaaccttgcatttgtgaggtgttcattgactgcatgtgtgataagcacctgcaataaatatatgcatcagatagtttaggcactggtgacagggaaacaaataagatatggtcatgcactccagaggagtcagaacctagagggggtgcatgtgtgaaaacagcccacctaccctggattagtgcacagacagggagagtgttagttctttctgatagcagtgcagaaagcgtgtgacaacagagggagtcttgagctggccctggtgagctgaggcaggtttttcaagccagacaaatgagaaagggctttccaggcagggcggccagcaggggcccagggtcatgaaagaggagtggagagagcagaaaggttgctcagagccggggtgtgaaggtgagactgaccgtgaagaatggggaatccagggccattgtcaggcagaagcaggaagcagcaggccccaccttggccgtctggctgtgactgccatgtggggaaggtcggaggcgtggggcaggagagggaggacagggagactggataacgcccaagggtgccccggccccagcgtcagtcggggtggccgtctgattggaaacagagggccagggagaggctggtgtctgggatcccagggtttccagactgagcatggatggacgaggggtaatgtgacctggttttgtgaatgaagctgggcaagtagagagagggtgtatgacttgccaagtcaggaggtgacatcgagggggcatgtacgtgcagagctgagcagaggtctggctggacccaggtgaagccacaggggcgagattgcctggggtgatccgaggtgtgatgacagcagggaggcccgcgcctccaagaacacacggcaagtttaggacaaaacaaatatccttctgtaggaggcacaccctttcttacacagactttcatgcataggattcccttaaaagagaccctcccaaccctgccctctccctggccccctgcccctcctgcccgcctctgcaaaaccacagccaacccgccaccacctcgccttcctggatgactcattctttctgcgttgaagcagttgcatcctgcctcttgtttatgatttctttgtccctctgatgcttacggattggctcggacgctgttagcacccgtctcttgctgcaggcccacgtcggggaatcacagtgtatcatccttccgtgcgtgggtctctattcgagagggagtttctgttctatgttttgctcagttgcccccggtcactcttttcccacccccaagcaccagtggcctcgaggcggagggctggccttggccctgcttcacagtaaccgcggcagcttacccgcgacacctgcacgggagcggggccaaggctcaccccgcccctgccgggcctcgctcgggttcttccaccctgcgttcgcctcggaccgctgtggttagctgtgaaatgcccctgcggtctggttttctctccttttccgcacggttcttagtgtgttatgttgcttttccgcactgtacgttggaagctctagggctacgaaaacgcaggcagttgcgggggaagcgaaaaatccccgccctcatggaagttctgttacggtggaggaatcagaccaatgataagaagtcagaaaatcaaaagtagtttaaacaagtacatgaataaataagcatttaagatatagtaagtgcatgagagaaaaataaaacaaggctgggaggtagggaattccggggaagggggtggctcacattttaaataggctgcttgtgggaggacctgccatgttgatccgaggttaaggtgacctcccaaatgagctcatctgatgcacgtggagccaacaggtgaaagtgttgatggagtcacagattatttatttatttatatttttaggtggagtcttgctctgtcacccaagttggagtgcagtggcgcgatctcggctcactgcaacctgcacctcccaggttcaagccattctcctgcctcagcctccctagcggctgggattacaggcgcccgccaccacgccagctaattttttgtatttttagtagagacagggtttcaccatgttggccaggctggtctagaactcctgacctcaggtgatccgcctgcctcggcctcccaaagtgctgggattacgggcgtgagccactgtgccccgccgattatttatttagttttagaggcagggtcttgctctgttgcccaggctggtgtgcagtgatgtgatggtatttcattgcaatcttgagctccccagttcaagtgagccttccacttcagtctcctaagtagctggggctacagttgcccaccaccatgcccggctaaattcttttaaaactttttgtagagatgggttctcactatgttgcccaggctggtctggaactcctggcctcaagtgatcctcccacttcggcctcccaaagtgcataattacaggcatcagccactgcacttggcctacagattaatttatgcccaagtgccttcctgacagaataaggtggctttcccctcctctcacccctagcatataagaaagctacattaaccaaaaggagtatttggtagtgtaactcaaggtagaggaagagacagagattctttttgcaaaatgacacgcaagaagcagccccttctcactccaaagtgggcctcttcacagcctggctgttttgtgggtgctccacccatccagggactggggctgctgggcccagtgacctctgacctgccaggcgccaagcggcaacaaaagggagggagagctctggcccaccgggcaatttgactcttcctggagccctgcagggggtggtggccccgagaggctggatcagagaccctcaggtccgaaggtctggtgggctaaatgaagtagagaggccgccctcaactccaccctgccgggattcaggcgggctcaaggacgcagcttggcaaggactgtcttatgtattcgccttgatgcgtggtctggcaggttcactgtagtctgttgaatgatgtgtgtatcctttcttctgttttacacacctgttttgagaaccatttacttgtagcacagtctgtgtataaagcctaaggtagatgcagcagtggttctcaaacctggctgcatacattttgggcagtttttaaaatatcccttcttgggcctcatcccctggacattctgacatagtgggtctgggctagggtccgggaattagtctttgagttttgcagccaccagatttgagatgcattgaaccaaatgatttctgtgggtccttattcctgatatctgattccccccaacctgcctaagcatccccaggctcttgtgtcctatgccagcctctcccgctcctcgtggggctgtgagggtttgaccaccgtaagcatgatgtgcctgcaacaccaggtctcctccccaggctgaatgcatggatctgtcctcttctgcctggggtgagagacagccttctctgtggggaaaccagctaccaccctgaagagctgcctctgtcagagcacaagatccccacctagagaccccctcactgctcccctcccacagcagcaacggcagctctgaggttctggacaccccaaaggacacagacctaccttcacccatgagccgtccaggagacatttgacagctgctgtgtgccatgtcctaggggtaggaatgcaaaataagtcagaggccatccctgctcctgaggcatttacaatccagtgagggagacagaggattataacacaacacagagcggggcacggtggctcacgcctgatatcccagcactttgggagaccaaggcgggcagatcacctgagattgggagttcaagaccagcctggccaacgtgggtgaaaccccgtctctactgaaaatacaaaaattagctggttgtgaggcaggagaatcgcctgaacccaggaggcagaggttgcagtgagctaagatagtgccactgcactccagcctgggcgacagagtaagactctgtctcagaaaaaaaaagcatacaacacggaattaagaaaagctcccacctcaacacagaaggacaccaagcccggcccagaaggacagggaaggcatctggaaggaggtctcatgatttggccagatggaactattggggcacagccagtgcaaggcgaaagccttccaggctgggggctctgtttcagcaagggagaatgattatggctcacattaattaagtgcttcctgcagcccaggctcttagtggcttatgttgtatgaactacttattcctgatgactactgtggtaggtagaatcatggtccccaaagatggccaccctctaatccttggaacttgtgaatctgtgaatcttacacagcaaaaaagattttgcagatgtgattaacggaaagatcctgagatggggaggtgatcctggaatacctggcaggcccagtgtcgtcacaaaggttctcataagaggaagataggcgcatctgagagagaaggtgggggatgctgctgggctggctttaaaaatgcaggagggcccgttactgggtatatacccaaaggattataaataattctactataaagacacatgcacatgtatgtttattgcagcactatttacaatagcaaagacttggaaccaacccaaatgcccatcaatgatagactggataaagaaaatgtggcacatatacaccatggattactatgcagccataaaaaagaatgagttcatgtcctttgcagggacatggatgaagctggaaaccatcattctcagcaaactaacacaggaacagaaaaccaaacatcgcatgttctcactcataaatgggagttgaacaatgagaacacatggacacagggaggggaacatcacacaccgagccctgttggggggtgaggggcaagggcagggagagcattaggacaaatacctaatgcaggcaaggcttaaaacctagatgatgggttgataggtgcagcaaaccaccatggcacacgtatatctatgtaacacacctgcacgttctgcacatgtatcccagaacttaaagtaaaatgttaaaaaaaaaaaaaaatgcaggaggagccacaagctcaggattgcagatggctgtagacactggaaaaggcagaaatacgaactctccccagagcttccacccacagccctcctggcaccttgattttagtccatcgagacccatttcagacttttgaactccagaactgtaaaataataaaactgcattgttttaagccataaatatatggtaatgtgttgtagccacaatagaaaccaatacaaccattcctctattttgaagggaagaaagcaggaggtgaagggaattacccacatttccggagctagaaaggagcagattcaggctccagggcctgcacctgtccactcacctctcttctgttcctcccgcctggaaggggtttaaaaacagcagtccagcagctggggcttatcggagaccaggagcattggaagatgaagctggccagatgcgcaggcaggagccagggtccgggaagctcttcttggtcaagtagagggaagtggctttgcaggccattggcctgggctccttttcggtggtctcctcaagtctgtgccggactgggagtgccacaagagcagaggtcagctccttgggcccagtgcacccacatgtggcttcagccacagagtgagctgtgtgcccatacagactgtgccgcctctctccattatcagatggtttaaaagtgccaccctggccaggtagtgaagggcagacatctggttaagtgcccgcagcatccttatgcatcgaaaattctcctatgttcaaacatctgtttccacctcatcattgttttcctcattctaattttttttttttttttttttttgagacaaggtcttgctctgtctcccaggctggagtgcagtggtgcaatctcggctcattgcaacctccacttcccaggttcaagcgattctcatgctttagcctcccctagtagctggtattgcaggcacgcgccaccgcgcccagctaatttttgtatttttcgtagagaaggggtttcgccatgttgcccaggctggtcttgaactcctggcctcaagtgatccccccaccttggcctccgaaagtgctgggattacaggtgtgagccaccgcgcccagcctcattctaattctttaatataaagcatcccccatcttccagcgtttgactgaaataggtggtcagaggaatttttaggtggtgttttaagcattgtttttttaaataaaggacacgtaagcataacctgaaactactcccgatatgtctgctcaatttatattccaagtattttgcaggctgtgcttggattttcaaaggagcaatcactagcatttgattagcatttttcagtttgctaaaagcattcatgtaccctgtccacttgatctttacagaaatgccaggaggcagggatttttttttttttttttgagacggagtctggctctgtcgcccaggctggagtgcagtggggaggcagggatctttatccccattcttgaaggaggagactgtggttcaaaggagaatcaccatcaggacaaggtgcctagaggagcaaggacggcacccagggcttccactcgaactccacactgttcctagggtatcctcttgccctaggggtaagaggtagcagctggggtagcagggaaagacctagaatgcacttacaaggaaatagggtcccagaatccagttccgatgtgtccctcccaggtacagaagtacaacactggggcatccgcatgccatcgcctgtcagtattggggatcccaccctgctttgggggttcatcggatctctggtcttaacatgagattgttgtatggaggaatgtgattgaggctcaccaacatctcagggcacaggcaattgccctgctggaggacccatggagatacgcaggtctctgatgggaggtctctgatgggaggtctcagcgtgggcaccgtgcctctgcgtggccgtggcttgctgcaggcactgctccccatgtggcaaagatgagggaatgcaggcctgctgctcagtgccagctgctctcctctacacggggctcccctagaccttgccccaggcctcaccgcaggacctggtgcctttggggttccccttttctgagacccccaaagagccttcctcaaataaatcaaaggctttagcgtctaaaacttgttcctgaagaaggctttctgaacccgctttggaagtaaaaagcaaaattcctctttgcacttctgtgtaatcgtcctcattctccttgaggcagtgcggataactctggctggtcagaggaggggcaggtatgaggaagcacggtgaaaacagcccagccctgtctctcaggatattctccctctacagagagagagccagttcctccctacactagtctgggcttacctgtctagcaagaggagggttcctggccattacctgggtgtcccctggcagtgcagcaataccaggttctcaaacactaactggttggttaaggaggttaagttaccttcagtcttctgcccttcagcttcctcaaggtggaaggtgggccttcagagccactgcaaggggtctctgaatacaggtgcacaacccaggaaacctgtgtagagcaattgcgactgccatgtgtttgtatcctgctgattaatttgcaagtatgcatagatgcctttgggattaataaagatgaatttaagtatgttactgaattaatcacagctttgtcgtgttgtatcttctgtggcgacagatactgaaaatacagccatgtattagttggttttgtgttgctataaagaaatacttgaggctcagtgattgataaagaaaagaggtttatttagccgacagttctgcaggttgtacaagcatggcaccagcatctgcttctggggaggcctcaggagggctccacccccatgactcaaacgcctcccaccaggccccacctccatacatcaggaatcacatttttccccgccgagatggagttttgctcttgttgcccaggctggagtccagtggtgcgatctcagctcactgcaacctccacttcctgggcttaagtgattctcctgcctcagcctcccaagtagctgggattacaggcgcataccaccacacctgaatcattttgtatttttagtagagacagggtttctccatgttggtcaggctggtctcgaactgctgacctcaggtgatccacccgtctcagcctcccaaaggaatcacattttaatatgagatttggatatccaaatatccaaaccataagaggctgtaagagactgcgtttgtctgattgactttagaagggacctaatttataaatgtttaaactttgcgctttaaaaccattggaaccatggtttgcaaaatccttccatttctggtgctccatggttcattaacaatgccatgttctggtacattttctaaatttattcactgtctatacccggctttgtattgccttcctctatcagctgctgacttcagcaaaggaagtatttcttttttttgttttgttttttgttttttgagacagagttttgctcttgtcgcgcaggctggagtgcaatggcaccatcttggctcactgcaacctccgcctcctgggttcaagctattcttctgcctcagcctcccgagtaggaggcatgcaccaccacgcctggctaattttgtattttttagtagaaacagggtttctccatgttggtcaggctgatctcaaactcccaacctcaggtgatccacccgcctcagcctcccaaagtgctgggattacaggcgtgagccactgcgtccagccagcaaaggaaggcagccttactgtggggtcctaattaggaacaaggagccaggctggtgggagcaagggaaagcagaaagaaaatacagataagctataaatctgcgtttcttcatagtctaggacacatagcccatctgcgcaaatgactcacgatcttcctgcacccagatatcaccagaccctcggttgatagaaaaatgcaagttagttcacagccaccttgacattatcaatactgcacttagccctctccagcacacagaacaagctccatcctataaaatccccaggaagcctttgtctcctccagtcagctcctctcttgctaactggcctattgctttcttgcaacatatttccatgcttttgctaataaatctgcatttctgtacctatgactgtcttggcaaattctttttactgcccgtgccactggccccagacagtaaccactcgtgacacaagggcattgactgggaagctttacagagagtgagtcttcctggtgcaggggtggagggtaattttgagactagctgatccctcaccctccctggaggagtggggactagttagtgaccagtggaactaactgtgccatcctgtaggaccccaatctgagctctctctgatttcgaatcctcccatttcccaccatgaacctttcctaggaccagagctttatttttctgcttctcacatttggattctcgtctttttatccttccctatttgcttataaagactgtccatgagctgggccatgtgtacatttttcttgctttttatggccttatcctggttggacttctcccatccagctgcttcttcacccaccaccaggtgactcctggttgagaggagaaataggctgagcacagtggcttatgcctataatcccagcactttgggaggctgaggtgggaggattgcaagaggccaagggtttgaggccagcctgggcaacaaagtgaacttctgtctctacaaaaaattttaaaaattagctgggcacagtggcatgcacctgtagtcccagcagcttgagaggctgaggcaagaggatcacttgagcccaggagttcaaggctgcagtgagctatgattgcaccactgcactccagcgtgggcaacagaatgagaccctgtctcaaaaataaaaattttttaaattttaaaataaagtggaaagagaaataaccagagccagcctccctggcagactgtcttgctcggaggcttcccagcactgtcccgccatatggtacatgagaagttctgtcatttcaggtgaaggggtgctggcacagagggcagatcttgtcatctgtggcttttttggctcctgggaagaagtggaacttatccctgcttgtctccatccccagcctgccattcataccaccagctctgctgctcagggacaagtctccatgaacaaccatatcgcagggaccagcagcaggctgtcactcattaaaacaacaacaactgcgtcagactctacatcgtttttcctggaaagtatccagattatttccaggctttttaaatgagtcctatattttttttcactgctgccaatatactctcttccatgcatggcgtacttgagcaacagacatcagcctgtctgcaaggtctgaataaccaccgtagagagatcctttgaatgtatggaacagatgatcagcagtgtccgtgggtgacagccttcaagattagttcttccttcctcttttaaaagcaattttctttgaatagtctttcggtttcatccatgcttctaatctagaatgaaaactacgtgactacgttttttctttttctttttgcttttgttttttcagaatcgagccattaagttgttacttaatctcaacaaaggccgatgacaatgtctaatattctaggaatgtgccaagtcgtcatcttggttttgttcccagctgaggcattttacttaattctaatcgttttggggcaggaagacgacagacagttacaaaagggaagactaaaacacaaagagaaaaaaccttgttcaaagtcatacaaataatttttaaaaatagaaataggattaaaagcaagtctcctggctcctcatccactcctcctgtctgaaaaatactttttccagttggttaaaccacatctccagaaccacttctctgtttgtacttgtaaggcagaattttctaattcatttctgggagctcattttgcagcctaggtattcagtctttgcacacagatgagaaacatgttggccgggtgcagtggctcatgcctgtaatcccagcactttgggaggccagggtgggaagatcgcttgagcccaggagttggagaccagcctaagcaatctagtgagaccctgtctctacaaaaaataaaataactagctgggcatggtggtgtgtgcctgtaatcccagctcctcaggaaggaggcaggaggatgacttgagcccaggaggagtttaaggctgcagggagccatgatggtgccgctgcaccccagcctggttgacagagcaagaacctgtctcttaaaaaaagaaagaaggaaaaacatgtcaactaagccttgccctgcatgacgggctgttcagctgggaagcagcaagcctccgcacacagccctctgctggtgacctcccaggccctcccaggcttcacttaaactctgctgtttgaggtgtgcacagaaggaagtattcttgctatcttttggttaactgagaactcatccacgtattgccactcataggaattagaaaaaactggccaggcgcggtggctcatgcctgtaatcccggcactttgggaggccaaggcaggtggatcacctgaggtcaggagttcaagaccagcctggccaacatggtgaaaccccatctctactaaaaatacaaaaattggctgggcgtggtggcatacacctgtaatcccagctacttgggaggctgaggcaggagaatcgcttgaacccaggaggaggttgcactgagccaagatagcaccactgcactctagcctgagcaacagagcaagactctgtctgaaaaaaaaaaaaagaaagaaagaaaagaaaaaagtaagctacgctgggcatgcaaacagtgttaatgcagaagccactttagggtccaggcaccgagcctccgctcagagcatcaatgcccaccagccctcagtgctgcatgctccaggacggtgcttcccagaggttctcagctgatagagcagcatgtaaccagtgtggaaagatcaacctaggcacattacaattttagagagtttatccgagcagagggtgattcattaattggacagcaccaaactgcaagaggttcagggctccactgagggggcgtgaggggtaaacatttataaggtgttcttggaagcaagacaaagaaaaaatacttgatcagttaaagtggagagtctcagctgggcacagtggctcacacctgtaatcccagcactttgggaggccgaggagggcggatcacctgaggtcaggagctggagaccagcctggccaacctggtgaaaccccatctctattaaaaatacaaaaattagctgggtatggtggtgcgtgcctgtaattccagctacttaggaggctgaggcaggagaatcgcttgaacctgggaggcagagcttgcagtgagccgagatcgtgccacggcactccagccggggtgacagagcaagactctgtctcaaaaaaaaaaaaaggagagtctctcattagaaattagctggtgattggttaggctcacgtttcattttactgttgacattgagttgggtttagtttgcttaggtcagaatcctaggcaaaacagccatctcagcctctggccacccaattgattattttctaacaccagctacagtagtatttcagagttcctcttccagagcccgtgtccctcaagtctacaggccatgcgtctaggtcattctgagctgcgtccacactcccacggtgactttctggtcattcctggggcagcttgagccatcagacaggacttgcgtatgacaggcgaccctgctccagaggccttgaattgctgtctcaggcagtgctggctggcactttgcaaaccgtgtactttcgtcagaattcccgggacaaacaaaacacccggctgttgctgctcagccttgatgacggcatctgataagtgatgagagcgtggcatcatcaggctgttggtcttgattattcaagtagttgagtcacaggctgctgttttcagcagcaaacattcaagtacttacggcatttgaagatgtgtatctggcagctttaaggtgctgacaatgtggggacctttctgaaatagtcccacaagagaattcttgaatgtcttgaagaaagatgaccagcctcttttgtgagtgtgcgtttagtgtatgtgaagttatggggaatggaggttactcattctattttaacagacagggaagtgtaaaagtgaagatgtgtggcatctctactcaccaactctaatcctattgtagtatctaccctggaaaaattatcgtgcaagagacatgctcataacatcattgtacaaaagaaaatattggaaataattcattgtccaccaacatgagaaaggataagtagaggggaacaatgtgatgaagacagtaaaaacccagaagtgtcatagaaatgaaggggagtgctcaggtccagggaccaaggtggctgcccagctcaagaaagctttgagccaggcatggtggctcatgcctgtaatcccagcactttgggaggctgaggcgggcagattatctgaggtcaggagttcgagaccagcctagccaacatggtaaaaccccatctttactaaaaatacaaaacttagctgggcatggtggcatgctagtcccagctactcgggacgctgaagcagaagaatagcttgaacccaggaggtggagcttgcagtgagccgagatcatgccactgcacttcagcctgggcaacagagcaagactcaatcttaaaaaaaaaaaaaagaaagaaagaaaaaagaaagaaaaatttgagaggctggtagcctcagaatgaacccttgaaggagggcagagatggcttttcacaagaagtgttgggtgctgagtcaaggaggggtaaagtagataaaatagtggaagcaaaagcatgcgagtggaagaggcctaggtccccgagagtaaaggcaactgcattgaaattctttaatttttcataccatatgggagaagttgggaccaatttttttgcttcttgtaattgcatttgacatttcagaagagttatcccaacttggtatggtgactcacacctgtaatcccagcactttgggaggccaaggtgggaggatggcttgaagccagttatttaagaccagcctgggcaacaaagcaagcccctgtcttcattttttttttaattggcggggcatggtggcacgtgcctagggtctcagctacccaggaggctgaagtgggaggatctcttgagcccaagagtttgaggctgtaatgagctgtgattgcaccattgcactccaacctaggcaacagagtgagaccccatctctaaaaacaaacaaacaaaaaagcaaaaaaaaaaaaaaaaaaattcaagcaaatgtttgactttatcgcttccaaggagaacaagtgccagttttgtcagagaggaaatgcatgtccatctcctgggtcctgctcagaaccaaaggaagctgaagactctacaaatgcaaaagtgaagggaatggcaaaccctgagagaagccatacagagaaaggaggctgggcttcctgcagggaagctgtctttaaaaagggccaccacctagcacctgcggatcaaagtgaatagggctgatgcgagtctcaatccccatattcagatatgcggggaaaagtgacttttctaaatgttttaaaacgcaaatcgaagcatgcattctgcctgtttggcctgcttgggttgcctcagtgtttccccagaacttacacaggaccaggtatctgtccactgggtgacccgtaggacaccatcatctgggtggggaccctttaggctggttgctgttggtggtcttgggtcctgcctggggacacaaaactctccacaagactgcccatgacctcctccgcttcagggcacccaatggccattttgttctagggtcttgtaacccccccccgtctcctaacaaggctttgtggcccccaaccaccccagcttgcagagagggtcactctccggtcctgcaggcaatgctcttcttcctcctgcttctggccaagacattttcctccgatactctgaattctttctcacctctggggtttaggcttttggaaacaaaagccagaaagactcttgggccatgtctggttttttgttgttgttgttgttgttgtctttgttgttgttgttgagacagagtttcgctcttgttgcccaggctggagtgcgatggcacaatctcagcccactgcaacctccacctcccgggttcaagccattctcctgcctcagcctcctgagtagctgggattacaggtgtgtgccaccacgcccagctaattttgtatttgtagtagagacggggtttcttcatgttcgtcgggctggtatcgaactcctgacctcaggtgatcctcccacctcggcctcccaaagtgctgagattataggcatgagccaccacgcccggccccatatctgtattttaacccatcacacccatcccttccttgaatggggaagtattggttgatatcacaaaatactatccagtctcatggttgaaactaaggatcctgattttcctttcaaagagttcagtatactccagtcttcctctctgatgaagttaacatacccggaagccttccagtttccaacagtgtcctggggagaggccattgtaaatggtctgcagcacaagtctgaagcacagattgactgccgcagctggttcctgcatgcatcagtggtgatcagagctgccacttcctcacagccccctgtgccgtaccagacagttttccaaacccttcactcacatgatctcatttcatctaaaactatgtcggccaggtgcggtggctcatgcctgtaatcccagcactttgggaagccgaggcgggcagattacaaggtcaggagtttgagaccagcctggccaatatggtgaaaccccatctctactaaaaatacaaaaattagctgggcatggtggcggacacctgtagtcccagctactcgggaggctgaggcaggagaattgcttgaacccagaaggcggaggttgtcgtgagctgagattgggccactgcactccagcctgggagacagagcgagactctgtctcaaaaaaacaaaaacaaacaaacaaacaaaaaactatgtcatggggtaagtgcattttacctattccacaggtgtgaaaaccccaggctaggagagataagacagctttcagaaagtcatgctgccaagtgacagagcctccctcaggtctgtgagtagcgatggtgcatttctcttcctcttgtttgtcatgagaaagtctcccagtcccaaagacagtctctaatttgggttctaagttctttttttttttttttttttttttttttttttttttttttttgagatagagtctcactctgtcacccaggctggagtgcagtgatgcaatctcagttcactgcaaactccacctcctgggttcaagccattctcctgcctcagcctcccaagtagctgggattacaggcatgtgccaccacgcccagctaatttttgtatttttagtagagacagggtttcaccatgttggccaggctggtccctaactcctgacctcaggtgatccgactgccttggcctcccaaagtgctgggatcacaagcatcagccaccgtgcccggcctggtgttctttatgaagctgctgtcttggcagcaatggtcacggaaaaggtcctatcagagagtgacgagtttgctcagtagacggtggggctggacattagtgcagctgaggtctgaccacatcagcaggaccagaattaggtgagaatttaaagaggcactcggccgtgtctcatcgcacttgcaaggccctgagatagatcacctctttaaattctgtgttctaggtccctcactagcctccctctagtcccaggccctccctatgagctttgaaaagcttgggaaagtcaagagaatgagcagacaagtcacagattgggagaagacatttgcaagacatctgataaatgctgtcactcagaatacaaaagaactcttaaaactcaatagaaaacaaaacaaaacaaaatcctattaaagatgagcaaaagttttgaaaaggcatcttaccaaagatacaaagatggcatttgaagagaagctcaacatcatatgtcattagggaaatgcaaatgaaaaggaggagaaaccactacacaccatttagaatggccaaaatccacaaccctgagaatacacaaagcgggccaggatctgcagaagcagacactcttgttcattgctgttgggaatgcaaaatgcaacagccactttggaagacagtttggcagttccttacaaaacgacacctcctcttcccatatgctatagcaattgcactccttggaattttcctgggttgaaaacttatgttcacacgaaaacctgcacacagatgtttatagcagctttattcataattgcccaaactcggaagcaaccaagatgttcttcagtaggtgaatggataaataagctgtgaaacatccagaaaatggaatagtattcagtactaaaaaagaaatgagctatcaagtcatgacacaacatagaggagacttacatacgtattgctgagtgaaagaaatcagtctgaaaaggctacatactgtgattcccactatatgacatcctggaaaaggcagaattatggaatcagtataaagatcagtggttgctgtggtggaggcacctcctgctctgaatgtggcgttggggagggttgaataggtggagcaggaaactcctctgtgtgacaccataatagtgagcacctgtcattagacatctgtcaaagcccatagaatgtgcagtgccaagagtgagccctattgtaaactatggactttaggtgatattgatgtgtcagtgttgggtcattgatggtcacaaatggaccactctggtgcaggatgttcatgggggaggctgcgcctatttggggacaggagttatgtgggaactctgtactttgtgctcacctttgctatgaacctaaaactgctctaaaaaataaagtttattttttttaaatgccgggaagtttgcagaagaaggctaggaaaatggggaagaaaagtactgtcccagggcaagaggagaaagcaagggaaagggatatcattcttgtggctttgtgtgggtcacagggtcggcctgcaaaagacatcaatcttcgttccctcccccagagccccagagcccctttgccaggctggggccctgacctgcttcttggaaacccttcctcatcagcttggcagctgcccgcatccaccagcacctcagtgtgggtcctcagcaggctgtggttcctccttgaacctacgtttgaggtcagcggttccccacgttccagaaagtcagctgtgtgttgcagacattcccacaagctgcaatttaccagcaaccatcttctcccagtgttcaggagcctgtttgcaaatagcactactggccaagcaaataaccagttagctgaggagctgggagaggaaatggtagtggagccaaaggcaacaaggaaaccttctttgatctgtcttagcgctaaaaaaatctcataggaagcaaatgaaatgagaagcaaaattgcacacaatgttaagcaaaaccttgatactctggaacaaagacatcctgttttttaacaaagttaattcttcaggaatgtaaaaatgaatggtttgcccgaggaatggttatagaaaattcattcttcttgaataatgctaggagctggaatatgacagcttttgtcttttcttcagttaaaaaatgaaatggaaaactcaaaattatcattttcctctaactgtcactttctactttgtaaaaatagcctttctattgaaacaatatcatgtcaaaatggaattggcagccgggcacgggggctcacacttgcaatctcaacactttgggaggttgaggcgggtgggtcacttgaggtcaggagtttgagaccagcctgggcaccatggtgaaacccccatctctactaaaaaaaaaaaaatacaaaaattagccgggcgtggtggtgcgtggctgtaatcccagctactcggggggctgaggcaggagaattgcttgcacccaggaggcagaggttgcagtgagccaagatcacgccactgcactccagcctgggtgatacagcgagactccgtctcaaaaaaaaaaaaaaaaggaattggccacacagactgaagtactagatgatctttgaagggactgctagagccacgctcttcaggcatgtgcttttcacctgtactctggccaggcaaaggctcggaggaccctccgtcttcggctcacagcatttaaacattgtggagtttttgtgttattgtgatttttagatgtccattttgtctctttagtagagaatcagatagataatagaaataatcattcttccctcagctttttgcaagctgggaatacagagatgtgcatgaaagaggaggtctttctcctaccccagctgctggttgctggggagacagcatgatgaggggggctgctgtggcggaggcaccccccgctctgaatttaaaaggtgaaagtggtcaggaaagatcctctggaggtcaggaaagattccctggaggtcaggacagctgatgcaaggtatgggagtggaataggtgctcaccagacaagaaaggaagagcgttctcagcagagggagtggcatatggagagcccaggatggagcaagcccgctacagcccgtctctcctgcagactgcagcaaaaacgctggaaaaatataaaaagcaactccctgaggactcacgaatcacataagagcatgtggattggggaggacaggcagaagccacgaagtcacctgtgtggatgggagtgtcctttacatttgttttctccttattcttgtggctttgacctgagtgggcccaagagcagggctgcagcggtggccgtgcaggtagcgaatgttctgatggaaaccccacatggctggcgagaggaactggggaaagggaaccctgtgatccttttttttctttttctcctttctctcacagctttgccccaagaacgggccccagttcagaattgcacagtggtggctgcatgcaggctaaatctccaagataaaccctgtctttctggtcagggaaacaggaaaaggtgcccttttgaactggagggtgtggcagaaaccctggagaggagagagtgtgagaagtggatcatctcattcttttttatttttttcttgaaacagaggctcgctctgttgcccagggtggagtgcagtggcgcgatctcagctcactgcaacctctgcttcccgggttcaagcgattctcctgcctcagcctcccgagtagctgggattacaagcatgcaccatcacgcctggctattttttttttttttttttgagatggagtcttactctgtcaccaggctagagtgcaatggtgcaatctcggctcactgcaacctccacctcccagcaggttcaagcgattcttctgcctcagcctcctgagtagctggggtccaccaccacacctgactaatttttgtatttttagtagagacggggtttcaccatgttggccaggctggtctcgaactcctgacctcaggtgatcgaactgctgacctcaggtgatccacccgcctcggcctcccaaagtgctgggtgagccacctgacctcaggtgagccaccgtgcctggccgaatttttgtatttttagtagagatggggtttcaccatgttggcccagctggtctcaaactcctggcctcaagtgatctgcccaactcagcctcccaaaatgctgggattacaggtgtgagctaccgcgcccagcctcatctaactctttttatgaaccacaaaagttccagcctcaccccttagctacacatgcttaggacagaaccaaagtaacatagcaaaagctttgagaacagaattaggattcataccactactcacgtctcttggagttgcaaagactaaaaattaagctgagatcagaatctaacctcacctaatctaacaacacacttctaaatagcccatggttcaaaaaggaaatcaaaagagaaattagaaaatattttgaattgatataaaaatgtgtgggactcagtgattaaagggaaattcataccattaaatgctgattttatttcgtttcatttttatagaatatagctttatttatagaatcttacaaatcatttacagtccacataagttaattttattttctaatttcttttcataagagctgagttattttttaaaacaatgtgctggaggccaggtgcggtggctcatgcctgtaatcccagcactctgggaggccgaggtgggaggatggcttgaaccttggagttcgagaccaacctgagcaacatggcaaaaccccatctctactaaaaatacaaaaattagccagacatggtggtgcactcctgtagtcccagctattcaggaggctgaggcaggaggctcacttaagcccaggaggtcaaagctgcagtgagccgtgatcatgccactgcactccagcctgggtgactgagcaagactctgtctccaaaaaaaaaaagggtaaaatactgcagtggaattgcagaactgtaaagggaaatatgaacaataaaatcctctcacacaaatatcggacaacttttttttgccaggtgcagtggctcacacctgtaatcccagtatgctgggagactgaggtgggcagatcacttgagttcaggagtttgagaccagcctggccaaaatggtgaaaccccatctctactagaaatacaaaaataattagccaggcatggtggcgcacacctgtagtcccagctactcaggaggctgaggtgggaggatcgcttaaacccaggaggcagaggctgcagtgagccaagattgagccactgcactccagcctgggtgacagagcaagactctgtctcaaaaaaaaaaaagaaaagaaaagaaaaagaaaaagaaaaaaaggaaagaaaaaagaaaaattaaaaaaaaattagactttttttttttttttggctaatctccagcatattaccatctcgtcagaagagggcttactaagaccagatcttaggcaacccaaacagagcctccttttttttaaacccaaggtgacggaccaatgaggaatagcccccaaaattgacattagacacaaaatacctgtaggagcaaggacaggggcagcctgcctgccagtgactaggtgagaaggagcagacacctggtgctggcttactgttcctgcatgtgacatgtactttccttggtaacattaacaggggctggtccatccagaaagaggttgaagctactaatgccaggggtgaaaagtctttagaacaactggctattccttagacttctagatgtacaaatgcttaaaacagcacatttggccgggcgcagtggctcacgcctgtaatcccagcactttgagaggccgaggcaggtggatcacgaggtcaggagatctagaccttcctggctaacacggtgaaaccctgtctctactaaaaatataaaaacttagctgggcgtggtggcgggcacctgtagtcccagctacatgggaggctgaggcaggagaatggcatgaacgcgggaggcggagcttgcagtgagccgagatcacgccactgcactccagtctgggcaatagagcgagactccgtctcaaaaacaaacaaacaaacaaacaaacaaactgcacattcaacacccagaagtccaactcaccaggcaaagctgttgccaacggcaacttacagtcaggagataatatgactgtctccagccccactaagttccgactaggactgacctctgcacccaaagagttttgtgttgttttgttttgttttttgaaatagagtttcactcttgtcgcccaggctggagtgcaatggtgtgatctcggctcaccgcaacctccacctccccggttcaagcaattcttctgcctcagccacccacgtagctgggattacagacgtgcaccaacatgcccgcctaattttttatatttttaatagagacagggtttctccatgttggtcaggctggtctcgaactcccgacctcaggtgatccacccacctcagcctcccaaagcgctgggattacaggcgtgagccaccacgcccaacctccaacgaaagttttaaaaggatttccctttgaggtagctgtctatgaaaggaaatttcttaatatagctgtgcacaaaagagaaagcaccctattatttcatattttatttttcaatttgttaaaggttatatttttgagctcctctcctaaacaagaaacctgctaactctaacttagtactttcttctccaaaacaaaggctattatttttaaggtataagaagatctatagggaatgctaaaattatacatttaatacatcgatgtgagttagggaaagcaaaatcttccagagtcataaactttgagtgttattttctggtagctcctgaaagcagttttagaaaaataaaacagaaaagatgaagaactgtttttataacaataataaagataatataaaaagttagatttcaacattcaaggaattggtttttggttaacctggaccataatcctatcaggagtcagtcctgatatttcatctagaatctcaatcactgaagttttcctccctcttcagcctattctcaaatctattgaagtcaacaggcaagataaggagagaaacttgtaatatcaccagcagtttccttgctcatgctcttttcaagaatatccctggtttgagagatgtctcccaggaagggaaaacaaaactgatgcttttttgtttttttccctgagacagtcttgctctgtcacccaggccggagtgcagtggcgcaatcttggctcactgcagcctccacctcccaggatcaagtgatcctcccacctcagccctgcaagtatttgggactacaggcccacaccaccacacccagctaattaatttttgtgtatatatatatgtgtgtgtgtatatatatatatgtgtgtgtgtatatatatgtgtgtgtatatatatatatatataaattttttttttttttttttttttttagagacagcgtttgcaatgttgccgagggtggtcttgaactcctcagcccaagtgatcctcccacctcagcctcccaaagtgctgggattacaggcgtgaactcaccacacccagctgatgctgcctttaatgactaagagtggacagttttctgtctaagaagatgaaaaactcactggcggcgtgcagtggctcacgcctataatcccaacactttgggaagccaaggtgggaggatcacttggactcaggagttcgagaccagcccggccaacatggtgaaaccccgtctctactaaaaatacaaaaattagccaggtggggtggcacatgcctgtaatcccagctactcaggaggctgaggcaggagaattgcttgaacccaggagacagaggttgcagtgagccgagatcacgccactgcactccagcctcggtgacagagtgagactctgtctcaaaaaaaaaaaaacaaaaagattaaaaatttaggcaatggcaatgaagcagtactcttgtgaatcatgcacacgaatcagtttgtgaacacagcccctgggctgcaactgcaggcaccactgagaaaggcttctggagagtctggcttcccaaattggctaaagaaactcatgttatccatgtgatagtaataaatcgattcacacagtgagccctgcagattagctttccttgaagccagagttctgaggcaagggatccagcgtgcctgaggctggcccacggttttacagacaagtatatccgtccattttctgggcagaatcagagcaattcatattcatattcagttcaacgaaggattccactttttgtgtgtgtgtgagggaggaagcggtaacctacacaggtgattgaaagcccatctgtagcataatcactgggctgccattctgcaaacatctgcagtgccccaaactaagtttgtgaccttacatttcagagacccctgttattcatgcttttatttatggaagtagcaaatcctaaattttgcttgcactgattccatttctgattacccttgtttaagcagagcataaactgcattccaattctaccagtcagcttgccactgtgcagatatctccactaggggaggatagtttgtgcagtctgccttctaacagagatgtctgaaatatgctcagaatgtgcttttagggaggcagctcccaagtcttgtcttgtcttttcttttctttctttttttttttttttttttagatagaggcagagtctcactctgtcgcccagggtggagtgcggtggcacaatctcagctcactgcaacctccgcctcacagattcaagcaattctcatgcctcagcctcccaaatagctggaactacaggtgcacaccaacacacctggctagtttttgtatttttagtagagatggggtttcactatgttggtcaggctggtcttgaactcctggcctcaggtgatccacccacctcagcctcccaaagtgctgggattacaggcgtgagccaccgcacccagcctgcaagtctcttagaagataggagtggggaagggaagtgggaatcacagcaaaacattgtttccttgtagactctctgaccttccattctgtcagtgttgacctgaaagaggaggtccaggaagctacattacctccacattagctcacctggacagccaggaaataccaggtgctgcccccaaatcaatacccagcattctgctaggagcagatgagcaaaatgacaagacacagagcatccgtcccactttctctcccactccggatgatccctgcctcccctctcaccctgtcatctgttctcacttagaattctctctgagagaagtaataggcaactaagcagactttgaaaaaataagagggattcctgcatcttctctgtaagaagaggtgaacctgtttcaaaactggccagccggaggtccaggatgcccagccaatgtcatgggccccaaactatggattcacctcttgatatttctaaccaagttaaaaccactggctgtatttttgcattgtcaggtaaaggattcaaaatctttcggcactgggcagggcacagtggctcacgcctgtaatggcagcactttgggaggctgagacagatggatcacctgaggtcaggagttcgagaccagcctggccagcatggcgaaaacccatctctactgaaaaaaaaaaaaaaaaaaaaattagccaggtgtgtttgtgggtgcctgtaatccctgctactggggaggctgaggcaggagaatcgcttgaacctggaaggtggaggtttcagtgagctgacatcgtgccactgcactccggcctgggtgacagagcaaatctccatctcaaaacacgcgcgcacacacacacacacacatctttcagcactggttccaagggaaagaggcgagggtaatcagagaaaaaggcttgtcttgcaagctgcattcaggttccagagtcacagagagaaaaggaggtgaggagagggtgagaggtactacctggagactggttactagggacgtttcttcctaggacagagcattgtaaacaccgctgacatctgaaggcgggaatacaatctgtgtaagtttttcatggaacaacctcttccacggtgctttgtggatggcgagtcctcaggccagggatcgggcagcccagggcctgacttcccatcccacaggctcctggcagggccctacccaatctggatctgtcctgaatatatcacgaggaccagcatgacggtgaatctggccaacagacccaggttctgaatgacaaaggggatggagatgctgcccttcctcccatcctcttggcagacctcattcgtctcagggaacatatcaaccacagcaatattcaagaacattcctccaaccagcacaaaaattcagttggcagagaagtggctgctggccaggatgccaaaggccagacccacatagcagcaggcggaagggggttgaagaagacagtgctgaatggtcctcctagcgctaagcaggatgacaaagtcatgtgggaactcctcatggaagacggccaccaggtgccgaggccttggaccacacagacggtgaaagaggcgccagtggccaggctgctgaggacattgtggaggctgttgcttagggtgatcacccaggccagagtgctgataaagtagtggacacctttcagctccagcaggcactctggggagcctgcagaaccagcacagagagtgagcccaccacgaccttcccatccatcatggactgcttgccatccagttcactgtggcagtgctgagggctcatgtggtccaggtccccattctgcagcttctccatcacccccctcctcctggtgcttcttggaaggaagcctctcagaggcataatggctatgtctatgtgatgttcattttcctgtttgagaaacatcttcaagatctctgaaaaataaaaataaaagcccccagacaccactgcagacttggacacataatcatcttccagagggttgaaatcaaaagccccaggaatgagctaggagagcacattggactagaggattccaatcgccagagctatgacgtggagcagcagcttccttctgtaaaaggccttcttgaaggcaccacgatggtgcccatgagggagcagagggagatgacagtcacatagaggagatcgtatccccacacttcagttgcactagatggtcatcccagcattgaacagcatgacagagaatcctttttcttgccttatccagcttctagaggctgcacactccccttcgcttgtggcccccttccaccttcaaagccagcagtgtagcgtcctcagatctctctctgactctgacactgactcttctgctcgccctttcacttacaaggtcccttgtgataatccatggtaattggttccaccaggataatccatgataatggtcacacagaggagactatatccccacacttcaattgtgctcagcctcccctcttcgatctatgcattctctcgttctcctggtccacagaggtgcgggccaggaatctagctcctggagaatggcggcagagctcctggagctcactccttccaatccatgactgccactgaaattgtgggcagcaaagcagtctccagaactaaagcacatcgagaggttcctctgtccctgcatgggctcagtgaccttatcccacctcactcccaattccaggtagttgagcaggatgaggctgctcccagcccactgccacatccagattcagctgctgagtttatcccacaggaaagaggtagcactgacagcgtgcacgcctgtgggtgacgcatgatcctcaggagcagttcaccatgcgctgagcagggccagtaggaggcagctgtggaaggccaggtacagcagcttcatggtcaccaaataagcctgacactcaagcagacagcagccacccccatgcagcctcagctgcagggccccagggttgctggctacggcaggagcagctcagtccatacgtctgcacaggcacccatctgcctgaaccctgatccctgtgtcaggcaaaaatgtttattttagaaaaaaaggaaggtctctctaatcactgacctcagcttttgctttaataaactaaagagagagagagagaaattcaaaagaagcagagaaaggaaataatatagaataataaagcagaaatcagtaaaattgaggacagaaaaaagagtcaatgaaaccaaaagctgcttttgtgaaaagagtcataaaaataaatctctagccagaccatccaagaaaaaaaaaatacaaatgaccaatatcagaaatgaaagacggaacatcactacagacctacatacataaaaaggatattacaaagaatgttatggccataaattcagcagctgaaatgaaatggataaattctatggaaaacacaaacaaccaaagatcacacagaagaaatggagaatctaggccaggcgcagcggctcacgcctgtaattccaacactttggaaggctgaggcaggcagatcacttgagctcaggattttgacaccagcctgggtaatatgatgaagcccgtctctacaataaatacaaaaattagccagtcgtggtgactcacacctgtggtcccagctactcaggaggctgaggtgggaggatcacttgaacccaggaggtgaagattgccagccttatatgtcaggactgcttgaaaggttcacacaccctcttcctctgctgcatgagaacccaaccttggcaactacctagctctgttaccctgtattgctgccgtagcaagttaccacatgcttagtgacttaacaccagtttattatattacagttctagaggtcagaagtccaaaatgaatctcagtagggtaaaaccaagctgttggcagagctgtgtttcttcaggaaacaccaggagaaaatccttcttgccttttccagcttctagaggctggacacttcccttcacttgtggcccccttccaccttcaaagccagcagtgtagcatcttcatctctctctctgactgacaccgactctcctgcctcactctttcacttacaaggccccttgtgattgcatagggtccactaggataatccatgataacctgcctgtcttaaggtcagctagttagcaaccttagttaattgcatctgcaacctaaaacccccattatcatgttcacaggttctggggagtaggacacagataactttgggaagccattattctgcctgcctcaccctgtaaaccagttaagatgctatatgtcaactacattgccaggcaacattgcttatggtaaaaatggcccctgactggtgaattacatatggactgggagtagctaggaatggaatttaaatatctgatgtagacgccatgctttgaacttctcagcattttggtgactgctatggtctgaatgtttgtgacccccccacccctccaaaaaaaattctgtgttgaaatctaatccccagtgcagtagtactggggctttaggaggtgattagatcatgggggcagagccctcatgaattggacttgtgcccttataaaagaagcctgaggagcctgtttgccccttccctcatgtgaggacacagtgagaggtgaacagtctgccgcccagaaaagggcccttgtcacaacctgaccatgctggcaccctgagcctgaatttctaagctcagggaactgtgagaataaattttgtagtttaaaagctacccaggacgggcatgatggctcatgcctgtgatcccagcactttgggaggccaaggcgggtggatcacttgagcccaggtgttcaagaccagcctgggtaacatagcgaaaccccatctttactaaaaatacaaaacttagccaggcgtagtggcgtgcacctgtagttccagatacttgggaggctggggcaggaggatcacttgagcctgggatgtcaaggctgcaatgagtcatgatcgtaccactgcactccagcctgggtgacagtgagaccccgtctccaaaaaacctacccaatttatggtattttgttatagcagcccaggtgaaccaagacagtgacgcttgtgaaagtcacgtccccgagatactgccctgtggtgcgcatcttcccacgcagaccctgcacctccctgtgaaggccccgtctgtttgcaccatgaccatcacatggggctaagataactcctggatgttacatactctgctgtgagaaattctccaggactcctcacacaaggcagcctggcattgttctgctggcaggccagggcctctgtccccatccttctgaatagatcggagcacgttctgtcatcgtcttgtgagtctgaatgtctagtcaatcttcgacgttgtcctgggctaaagaggggctgtcttccatctgataaccaatgaggagccaacccttatatttgtaagtacttcgttttctttttctttctcctcttttttttttttttttttttttttttgtgagacaaagtctcactctgtcgcccaggctggagtgcagtggcacaatctcagctcattgtaacctcaacctcccaggctcaagcaattctcatgcctcagcctcctgagtatctgggactacaagcatgtgccaccatacctggccaattttatttattttttgtagagatgaggtcgtactatgttgcctcggctgttcttgaactcctggactcaagcgatcctcccgcctcgacctcccaaagactgggattacaggcaagagccaccacacctggccaatacttcatcatatatactggcaatgctcaggcaaccctgttaacagtcgaaactgagacccacaatggttggtaatttgcccaaatttgcccagaaagttagtgggctctttcccccttctcaaatatgctaaaaaacaacccacctgcttggcaacattgtctaatgcgaagttgggattagtgcccagttcttcaaaagatctttatggaccctaagtcacagatatacatccaaccaatggtcaaatctactcactgacttcctgctggtgctgggcactacatattcaagaatctcggtccagggaggacgcaatggcccacatgtataatcccagcacattggtaggcaaagtgggaggactgcttgagcccaggagttccagaccatccagggcaacatggcaagaccctgtcctacaaaaagtaaaaaataataaaaattagtccagcatggtggcacacacctgtagtctcagctactcaggtggctgaggtgggaggatcacttaagcccaggaagttgaggctgcagtgagccatgatggtaccacttcactccagcctgggtgacggagtgaaaccctgtttcaaaaaaaaaaaaaagagagagagagagaatctctgccctgtgggtaactacattttatctcttttgcagtgcttctttttattttttattttttctttgagatgaagtctcgctctgccgcccaggctggattgcagtggcactatttcagctcactgcaaactccgcctcctgggttgaagtgattctcctgcctcagcctcctgcgtagctgggactacaggcatgggccaccacgcctggcaaatttttgtatttttttcagtagagatggggtttcaccatgttagccaggctggtcttgaactcctgacctcaggtgatccgccctcctcagcctcccaaagtgttgggattacaggagtgagccaccacgcccagcctcttgcagtgcttttttttatcttgacagagacacatggccagggtgagagaaagaggaaatcagcagtttggtaggaatttgaaacaggagcctttttctagcaccttgaataggcaatggtaggaaagtcagaaattaatcaaaaatgataaagacattcgagaaagacacaggaaccagcttgaaggggctcccactggccaaatccaggacaatttatacatcaaaataaatactgatagtaatgaattgtagcctactgaataaaacagaaaaccctgagtgcctcctaatagcagccaataattgaatatattgaaagtttgataaggaacaagtttagacagtttcaaggtatctttccacaaattcttattcattacaaaaataaaaagtaactacagtgaagaaacttggcagacaccaccttaatcacgtgatgacaacgaacatcattaatgggacaaggtgacatcttgggctactggataggatgcaatgagaagaatgcagtttgtcttctgtgatgttcctggcaaaggataacacctgcatcttatgaggagacagaaaagaagcccgaattgaggggtgttctacaaaataacggccgctatcttggaaagtgctgtgggtcgtcaaagtcaaggaagggctgaggggttaaagaggcataagaactccatgtggcgtgtgattctcagctgaatttactaccgtgcagggcattactggtgcatttgatgaaatctgaatagcgttagaggattagatgatggtaacgtatcaataatagtttcctaactttgatggctctatcatgtctttctgtgtaggaaataagaagtattcagggctgacaggcagttaggttgacatctcccattcaagtggttcaagaaactttttttttcttttctttttttgagacagggtctcgctctgtcattcaggctggtgtgcaatgacgtgatctcagctcactgtagcctcagcctcccgagtagctgggactacaagtgtgtgccaccacacccggctaattttttttgtagagatggggtttcaccatgttgtccaggctagtctcgaactcctgagctcaagtgatctgcctgccttggcctctcaaagtgctaggattacaggtgtgagccactgcgcccggccaggaaacttttctttatgctatacttgcaacctttctgaaaacttgaattgttacaaaattcaaaatatttaatgttaagactttttttttaaagtaaatgatgccaacaagcatatgaaaagatgctccacatcattagtcattaggcaaatgcgaatcacaaccaagagagggtaccacttcacacccacgaggatggctataacccaaaaagtggaaaataacatatgttggcaaggatgtgaagaaattggagctattgctgatgagaatgtaaaatggttcaaaataggtactcaaatacatgttcgtggcagcattattcacaatagccaaaagatggaaacagcccaaatgtctatcagcagatgggccgataaactaaatgtggtgcacctgcatcatggaatactcttcagccataaaagggaatgaaatactgatacatgctacaacatgcatgaatcctgaaaacattacactaagtgaaaaaagctggccaggtgcggtggctcatgcctacaatcccagcactttgggaggccaaggtaagaagatcgcttggagccaggtgtttgagacaagcctagacagcaatgtgagacccctgtctctatttaacaacaacaacaaaaaaaaattgaggagccagacacagtggctcatacctgtaatcccagcactttaggaggccgaggcgggtggatcacctcagctcaggagctccagatcagcctggccaacatggcaaaaccccgtctctactaaaaacacaaaaattagctgggcgtgatggtgggcacctgtaatcccagctactcaggaggctgaggcaggaggattacttcaactcgggaggcggaggttgcagtgagccgagattgcaccactgcacttcagcctgggtgacagagtgagactccgtctcaaaaaaaaaaaaaataaaaaataaaaaactaagtaaaaaagaaaacaaaggaagaatccagtcacaaaagactgcatattttgtgattttatttatgtgaaatgtccagaatgggtaaatctgtagagacagaaagcagactgttggttgccaggatctgggaggagcgggaagtgaagagaactgcttaatggagaactgcttaatggaatgaggttttattctgaaggtgtggacgtgctttggaactaaatagtgttggtggttgcacaacattgtggatgtactaaacgtcactgagttgctcattttaaaatgattaattttattgtaagtgaattgaacctcaatacttttttaattcaagcatttcaatgtgaatttggtatttttttaaaaaggaaatggtaagtgataaaacatagttggcagcagctggcagcagcctttagaaacagcatttcctggccaggtgcagtggctcacacctgtaatcccagcactttgggaggccgaggtgggtggatcatgaggtcaggagttcgagaccatcctggccaacaaggtcaaaccgtgtctttactaaaaatacaaaaattagctgggcatggtggcgtgcgcctgtagtcccagcaactcaggaggctcaggaaggagaatggcctgagcctgggaggcagaggttgcagtgagccaagatcacgccaccgcactccagcctgggtgacagagcgagattccatctcaaaaaaaaaaaaaaaaaatagaaacagcatttcctgtagctggtcccagaggatggagtcacctcatctttcttggacagcctcaaagtcccacatcagaatggactaaagtgaggggagggggctgggccctgtgctgggcaggagacaccctcccggagagaggcagggagggtggcctcatgacttctgctcttgtggctttgctctgaagtaggaggctgcaccctaaccctagcaagaatactgaaaagccgtgccgatgggatggcatgaaagggagtcaggctgggcggcgtggatggatgaactgctgcgaactcattctccctgatcaaagcgcgtgacccactaaattcacactggtggttttctactacagagtctgtgaagtacaatgcatttgcttcagataattcacagaaccacttgtctgcatgctttccgctgtaggcggctgcctcccgagagtaggccccacggtgcacccagtggcgatggccagcaacctcattgaacaacacactgtccatccgtgctgtgtaatctgatgttggtggtgacaccatagctcatctgtcacttctccatttagcaccatttcaatatttggtctggaaagaataattagttttattggcactaagtaatcttttacctccacaaatctgaaaagtacagattgaagaacatagaaagaaaccttcagggctgggtgcgatggttcatacctgtcatcccagcactgtgggaggccaaggcggggggatcatttgaggtcaggagttcaagaccagcctggccaacatagtgaaaccccatttctactaaaaataaaaataaaaaaaaattagctgggtgtggtggtgcgcacctgtaatcccagctactcatgaggctgaggcaggagaattgcttcaacccagaaggcggaggttgcagtgagctgagatcacacgactgcactccagcctgggtgagactctgtctcaaaaaaaaaaaaaaaaaaaaggaaagaaaggaaggagggagggagggaaggaaggaaggaagctagctactggagaagtgagcatgcggcttccttcctctgctcgcccccccatgctgctttgggccaaaggctctgcacgcagcccagccttctgacccatgctccccctggcccatgagcctcccacagccaggacttcccctgcccctacaagtcatgagttgctcagctccgtcttcagcccaaactccctgtgaattccatctctatcagtcctcctgtctgctggccatgtgcttctcagtttcccaaaggcctcctaagttcagcctggccctatgtgaactctgcaccccattccacttgctcttttcctaagcgtgcggaacagcacagcaccatctccctggtggtcagcccagatatgccttcctttcccccctccccagcatccagatcctaaccacatcccctggctcttccaccctcaccacctggctctccaccccgtctccctaccagagccagtatctagactcccatggtttcctcattggtctgtttgatttttcttttttttaagacggagtcttgctctgtcgcccaggctgaagttcagtggcacgatctcagctcactgcaacctctgcctcctgggttcaagcgattctccttcctcagcctcccgagtagctggggttacaggtgcatgccaccatgcctggctaattttttgtattttttaatagagatggggtttcactatgttcaggccaggctggtctcgaactcctgacttcatgatccgcccacctcggtctgcttgtttatcttgttcacctctgatccattctccacactaggttgaagtgacctttctagaatgtaacagcagagcatggtggtacgcctataatcccagctacttgggaggctgaggccagaggatcacttaagcccaagagtgcaagaccagcctgggcaacacagtgagacccacccccccacactctcaatcaaaaaaataaaatgtaacagcaatctttttacttctctgttaaataacccttcatttgatgacacctgcctacatgataccagtcccacactcttagtgtggcactcaaggcccttcctggtctgctccctgacctcctgggcttcaggaataagggaccacccagggtttcctgaaagtgccaggctggttctcagttgctccgtctttacccatgctgcaacaccacacttgcatgggacttctgcctggaactccccctctctgatcacagtgcctagtgggtcccattcatcttcctaggctcaaattgagtataaagcccttcctaaccttctccttacctgaatcgatcatctccttcttggcccctctaccctttactgacctctgtggtagcaccttgatttgattgttgagtttgctgctgttagttttgtctccacataaatagaaggcaggaatcacgggccaggcacggtggctcacacctgtaatctcagcactttgggaggccaaggcgggcggaccacctgaggtccagagttcgagaccagcctagccatctcgactaaaaatacaaatattagctgggcgtggtggcgcatgcctgtaatcctagctacttgggaggctaaggcaagagaatcgcttgaacctgggaggcggaggttgtagtgagccgggatcgtgccgctgcactccagcctgggcaacacagtgagactccatttaaaaaaaaaaaaaaggcaggaatcatattccacctccacccacttcctcatttcttcagtgagatgcctgacatagtatgtgtttaatgaatgaatgaatgatatggggttctcaccttatttttgctgcttattagctatttaatggctttggacaaatgacttagctggccggatctcaattttctcattttacaagtgaaaaaaattgaggtgagtataggttataaattctgcttctcagttcatgctcccatcaccctgagatacattcctctcccacagccatgaaacgccatacaattgtcagagaggcgtttcttgtaggtattacaaagaacaacaacaacaaaatctgattctttgtagtagtgagcacagacttgtggccacatttctgggttcctgactatactgagttcagagtttacccccagaattcatatatatccagaacttcagaatatgactttatttggaaagtgggtctttgcaaatatgattaagttgaggtcatactggattaaagtgggacctaagaccaatggctggtatctttataaggagcgaagatgacacggtgagacacagagaagtgggttatgtgaagatgggggcagagattggagtgatgtctacaaatcaaggattgaatgtcaagtgttatcagaggtcaccagatgataggaaaagatgaggaagaaggattttctcctggggccttcagagggagcgtgaccctgccaacaccttgattttggacttccagcctccggagctgtgagagaataaatttttgttgcttagaaccacacggtttgtagtaatttgttcccacagctctaggaagctgagacgtggcccagccacgccatcgctcaactaccttttcgtcccccgtgtggtgatctgcccacttcagtagagctgcgatagactcgaatgacaatgaattcattctagactgtaaggtttatagactgtacaaacacaccagacacaggtttgtgttcctccatacgtgccggtcaacaccgtggtccagtttgagtaacttgaataacccagcagtcagaaagaattaacatcacagtcagtaagggctgatgtaagagcctcaggccacgagtaaacttctaacatcttctcctgttgattaagagttttgatttctacctgcaaggccgaagcaatggtcagggagtgtctgggtggccagctaggtgagggagtggatagcgtgaagggtcccacggaaggtggatctagtttctctttctgttgtttattctgcactaatttgtcaaatgttcttaagtataaccgctggtctgccaaccttctctaattttcttgaccttaataaggaccagataaggtgacaggtgaccagcaggccccagcgtcgttcggaccccgcgtgctcttcctaagaaactgtggttgtctctcaagtccattacaacccatgccctgcccaaagcttcgaatccctggacttgtttagcatctgtgtgattaggtgttattagaccagctggatgctatcgggcactcaagatgtaagttgagtaattgagacccatactgtaaaatgtatcaagcttgcctatcacagtacttaatttgcaaagtggttgaagtcggagtggggaagagtcatccccctgcgagggggacggtgttcctactgcaaacgtagagccctgggtgtctgggtgggagggcacctcgttccctgcactcccttcaggggtcaggacattcagctccagcctaggatgactgagaaacagcagaattgatcatgtggtgctaaaatgccaccttacacatccacgtgtacagatagaaaggctgtgccctttgctgccacagcgattatgacatccaggtgaattaggacttcccctgccttttattattattattattattattattattaattattattatcattattgagatagagtcttgctctgttgtccaggctggagtgcaagtggcgcgatctctgctcactgcaacctccacctcccagactcatgcgattctcctgccttagcctcccaagtagctgggacttcaggcacctgccaccacacctggctaatttttgtatttttagtaaagacagggtttcactatgttggccaggctgatctggaactcctgacttcaactgatttgcccacctcccaaagtgctgggattacaggtgtgagcaaccgcacccggccctcccctcccttttagatccctgtgtggaagcgaacgtgacctctattcttgagggaatgccaagatgtcaactcagttagtgaaattcttgtgacaattcaaagccaatttttcttacagctgaaaggggggaatcttaatgctcacgatgaacgctaggagaacccagcctgaatgttggtgcaaaagcagtgctatctggtgggcctagcatctaacagaattttagggtaaaatgttagaccctagaaataaacacagtttcactaggtggaatccttgttagacctgagtgcctcattgtattgagtttcccaaatacaagctcttaaatgagtacttctgtctcaggtttaaaagcattttcaaggcagccatccagtatactaacctctgttgaaatactgtatcggttagtgagatgcaaagctgctgtgaccaagagacgcagaaacacggtgacttaaagagtgtggaaatgtatttcactttctcatatgagcccagaagtaagaagccaggctaacggggccgctcagctccagggggaatttggggacgtgggctctttccgttttgtttctctctcgtcccccaggactgtgcttctcagattgtcttgagcatcagaaccacctggaggccttgttaagcactttcccacgcccagagcttcttttttgttgttgttgttgagatcgggtctcgctctgtggaccaggctggagtgcaatggcgcgatctcagctcactgcaacctccgcctcctgggttcaagtgattctcctgcctcagcctcttcagtagctggaattataggcacctgccaccatgcctggctaatttttgtatttttagtagagacggggtttcactatgttggccaggctggtctcaaacttctgacctcaggtgatccacccgcctcggcctcccaaagtgctgggattacaggcgtgagccactgtgcctggccccagagcttctattttggtaggtctgagtgggcccaagcatttgcatttctgacacgttcccaggggacattgatgcctccggtccagggaccacacctggaggcaccactcaggccactgtcctcgcctgcccttgttgaacttaagctgtagacacatccacgtgtgatgggaaagagctcagaggtccccaaatgatatctgaaagcccaggcctggaagcggcacccatcatttccactcattcatcgtcggcatctccattggcaagacgtgagtcacaaagccacacgtagctgcaagcgaccctggggaatatctatccaggggccacctgccctgtcaccatgacattcctgtgagaggaaggggagcatgggttctgtggacagccagcccacatacacccatgacaatatgatcattgcttatttatacatctctccctcagcacctgagctctttgagggcgggcaagtctcattccatcttacggcttcagaatctatcatagaaagcaatgtagatgctaaagtccaggtcaagttctttggttatacactgagagccgggcgcctccctcataagaatattcatggatcagcatggtgattccagcagtccatggcgcccctcaccaggcagtaagctctgtgagagcagagacctcacacctgtgcctcaaagccgagcaccactagggggctcctcttttagatgatttaattaattctagtagccacatctttcatccattgcttggaatgtatttcagatgtcagcccaccagcctatcccataccctaacaaggggttttagacaccttccctgtatcatcactgtttctcaaagtaaggaagttgttggagccatcagtacatctgcatgactctgggtcattacccttcacaacccagagttaatttagctccatttaagaactgaaacagcagcagccatggggaattaaagtctctgttgaagcctcagtttattctttcatgcacaccagagtcacgttcatagggactggctacggcgtgcccgccctatcttggcaatgggggcacagaagctaaaaaaaacaaggcctctgcccttgaggggctcccagttagctcatggccagccagtgggccttcccactacctcacaatgaaacacagcaattttttcaaagatgaatatattttcttcttttgagagggaagaaaagcttttgaaaacatcatggtaaaatttagtgctattaaaaagcagctttcagccaggagtggtggctcatgcctgtaatcccaatgctttgggatgccaaggtgggaggatcctttgagccaggagttcaaaaccggcctgggcaatacagtgagatcctgtctgtacaaaaagtttaaaaattagctgggtgtagtcctaactactccagacgctgaggttggaggatcacttgagcccaggagattaaggctgcagtgagctatgattgcaccactgcactccggcctgggtgacagagcaagaccctctctcttacacacacacacatatacacacacacacacacacacacaaaagccaggcgccatggctcacgcctgtaatcccaacgctttgggaggccaaggtgggcagatcacttgaggtcaggggttcaagaccagcctggccaatatgttgaaactccatatctactaaaaatataaaaattagctgggcatggtggcacatgcctgtaatcccagctactcgagtgactgaggcaggacaatttcttgaacccaggaggtggaggttgtggtgtgccaagatcgtgccactgtactccagcctgggcgacagagtgagactctgcctgtctaaaaaaaaaaaaaaaaaaaaaaaaaaaaagctttcttccgcaaccagataaaggaatccagtcaagagctaaattcccatcagctccaacaatctgtgttattttgagaaatagcaatgatacagggaaggtgtctaaaatcacttcctggggtaggctggtgggttgacatctgaaatacatttcaagcgttggatggaagatgctatgcaaatgccaggaggacaaggagaaattgatagtgtcttttctgatgtgtggcctctcaaagagcttctagagttagtaagttatctaaaagaggaatctaaaaagctgatggggctgtgaataacattaagggtcaggagaacagcacctctgctgtccaccactgttatgactgacccacgtgtcttcagccaggctcttcatcttggaccctgcataaggcaggactgggccctgctggtctagctcagaacttttcaaactctaacgtaaacctgaatcacctgggttaaaacgcagattcggctgggtgcaatgcctcacacatgtaaccccagcactttgggaggccaaggtgggcggatcacttgaggtcagagtttgttatcagcctggccaacatggtgaaaccccgtctctactaaaaatgcaaaaattagccaggcgtgttggctcgcgcctgtaatcccagctactcgggaggctgaggcaggagactcgcttgaacccgggaggcggcggttgcagtgaaccaagatcgcgtcactgcactccagcctaggcaacaaagcgagactctgtctcaaaaaaaaaaaaaacaaaccaaaaaacaaacaacgacaacaaaaaaacccgcagatttgacttcgtaggtttgggtaggacctgagattctgcattgctaacgagctccaggggatactgaagctgatgtctcccaccaggctgtgagtagcagcatgcagcctccccgaggtcccagccagtcctgttgagtgagagcctgagatacgggtttcatgacatacacaccaaagtgtgggatgctccagctagatgcagacttgagcagtgtgtctcaaacgcggctgcacattaaaagcacctgggaaggccgggtgtggtggctcatgcctgtaatcccagcactttgggaggccaaggcaggcggatcacttgaggtcaggggttcaagaccagcctgaccaacatggtgaaaccccatctctactaaaaatacaaaaattaagctaggcatggtggcatgcacctgtaatcccaggtacttgggaggctgaggcaggagagtcacttgaacctaggagtcggaggttgcagtgagccgagatcacaccactgcactccagcctgggcaacagagtgagcctgtctcaaaaaaaaaaaaatcacctgggaagcttcaacttccactgatgcctcagtcctcccccagagattgtggcttaaagggcctggggtttgacttgggcatcaagatctttatttttttaattttatatttttggggttttttgagaaagggtctctgttgcccaggctggagtgcagtagcatgattacagctcactgcagcctcaaaattccaggctcaggcgatcctcctgcctcagcctcctgaatagctgggatcacaggcgtgtgccaccacacccagataatttttaaattttttgtagagatggggtcttactgtgctgcccaggctggtcttgaactcctgggctcaaacaatcctccgctgcagattcccaaagcactgggattacagacgtgagtcactgcacccagctggaatcgggatccttaaaagtccccctagtggttcagatgtacagcaaagtctgagaagctctggttgcctatagagcagtggttttatcataatctccaagagagctaagacagaactctaaggtcatggaggtgggtagagcagggccttagtctctgtacattcccagaggattctgatcccaaccaaatttggggaaccgatggtagagaacagcttccccacagtgggctggggagtgtagtgtgcaacctacaggtacagccttgatccagcacctcagccctctgggtggggtcttgggtagccagagtcagggaagccagttgcctcagtggttctgttttccccagaatgtggtggaaaagtagaagaagcactgttatattaaaatacaaaaccaactccgggtgcagtggttcacccctgtaatcccagcactttgggaggtgagtggatcacctgaggtcaggagttcaagattagcctggccaacatggtgaaaccctgtctctacaaaaatagaaaaaaaattagccaggtgtggtggtgggcacctgtaatcccacctacttgggaggctgaggcaggagaatcacttgaatctgggaggtagagtttgcagtgagctgagatcgcaccattgcactccagcctgggctacagagtgagactccatctgaaaaaaaaaaaaatacacacacacacacacacacacacacacacacacacacacagcaaacaagttaaaaaaaaaaacaaactaaaacataaagcattcctggatctctgtcagagctctttacaagatcatgagtcccattcataagagctccatcctcatgacttaaccacctctcagaggtcccacctcctaacagcatcaccttggggctttggatttcaatataggaatttggggggggtaggggggacataaacattctgaccatagcacaggctgagaaaaatgcaccaagcacaacttcaaaccatctcccctgaagttgaggccaaaatgaatttggattccattttagccaggggagcaaacaggtctgtcagcttattcttgtcgggcttttagctttgctccaagttcattaggatgcctcggagatggatgccgtagggcagagcattcggaaaacccttggggaatgaactcattaccccagagtcagccatcctggagagactgtcctggagaagtcacagttacggaggatggctgcaaagggaaggcgaacagggctatgagtcttgaatgggctgtaagaaacctttcaaaggccaggcacagtggctcatggctgtaatcccagcactttgggaggccgtaggtgggaggatcccttgagcctaggagttcaagaccagcctgggcaacatagtgaaactccgtctctacaaaataaaaaaaaaaaaagtaaaaattagccaggcatggtagtggacgcctgtagtcccagctacacaggaggctcaggtggcaggctcgtttgagcccagttcaagcctacagtgagccgtgatttttccactgcactccagcctgggcaacgaagcgagaccctatctcaaaaaataaatattaaaaaaaaagagctttcgagtcgtctgatctcttctatgctaaatgtcctttggttgaaatcaaatttctaatgcatgtaagtatattatacatcaacaggctaaccatagttatctctgggaaaaggcattatcactggtctttattttctttgttgtaattatctttatctgcacattttttgataataggtgtttttttgttttgttttgttttttgctcttgttgcccaggcatgatcttggctcaccgcaacctctgcctgtcgggttcaaatgattctcccacctcagcttcccaactagctaggattacaggcatgtgccaccacgcctggctaattttgtattttttgtagagacagggtttctccatatttgtcaggctggtctcgaacttcccacctcagttgatctgcccacctcggcctcccaaaatgctgggattacaggcataagcccctgcgcccggccaggtgtgtgtgtgtgtgtgtgtgtgtgtgtgtgtgtgtgtgtgtgtattttgtttgtttgtttttgttttgtttttgtttttgagacagagtctcgctctgtcacccaggctggagtgcagtggagcgatcttggctcaccgcaagctccgcctcccgggttcacactattctcctgcctcagcctcccaggtagctgggactacaggcgcccaccatcacgcctggctaattttttgtatttttagtggagacggggtttcacccagttagccaagatggtctcgatctcctgacctcgtgatccgcccgcctcggcctcccaaagtgctgggattacaggcatgagccaccgcgcccggccccaagtgtatatttttataagaagaaaacacgtgacctgtttccatttggcataggtttggctggagctggggctccttgtgttggggggcagagcgactgggcatgaaggtttgcagggtccaggggagcagtctggtgaggcccggggtggcctgtggccctgaagttgtgtttccagtctgctctgggtcagatctgagggttctctgtctgcctcgagctccccatctccccaaggtctgatatggagtccccaggcttttggggaaggctgctgagtttgaggagaggggaaccatgggacagggtggatggggactctgggagcaatgccagggagtccccacacctctagacatgtctctggttgtgctttcaggtgacctcaaagcagaagctctgaattcacctctcatctgacgactgacagctgctgccaccgccagcctctgtcccttgcccaggcctgtcacacggctgcctctcagcaggtaaggagagtgacttaccctgtgtaggggcaggaggacagcaggtgtcttcgccaggagcatgtgtgtgggctggggtgagactcagttctcaggatccttgatggtggccaggtcctcacagcatcactttcttctagcaatcatcactgtcctgtccccttctcccaccctccacggcagacacggggcccttagaaaccttttgccacctcctgttatcccctatgtgaatggatgtgcacctgttgggggagcaggggaggagaactgagccatccccgagggctgctgggccttggctggggaaccgtgctgtgtgcttccctgtgggaaaagagatgctattgcagtgagcttccttgttcagcaaggatgaaaggaggtccaccactcacttcctccccactcgcagtttaagctgctgggtcccttcaggctcagggatagctgtgagaggtgacagcgtgctggcaaccctcacagcccttgctcgctctcggcgcctcctctgcctgggctcccactttggcagcacttgaggagcccttcagccctctgctgcactgtgggagccccttcctgggctggccaaggcgggagctggctccctcagcttgcagggaggtgtggagggagaggcacgggcgggaactggggctgcgcacggtgcttgcggaccagcgtgagttctgggtgggcgtgggtttagcggccccgcactgggagcggccggcccgcaagccccgggcagtgaggggcttagcacctgggccagcagctgctgtgctcaacttctcaccaggccttagctgcctccctgcggggcagggctcgggacctgcagcccaccatgcctgagcctccccaccaccatgggctcctgcacggcctgagcctcctggacaatcaccgccccctgctccatggcacccagtcccatggaccacccaagggctgaggagtgtgggcgcatggcatgggactggcaggcagctccacctgtggccccagatgggatccactaggtgaagccagctgggctcctgagtctggtggggacttggagaaactttatgtctagctaagggattgtaaatacaccaatcggcactctgtatctagctcaaggtttgtaagcacaccaatcagcaccctgtgtctagctcagggtttgcagggtttgtgaatgcatcaatcgacactctgtatctagctacgctggtggggacttggagaacctttgtgtggacactctgtatctagctaatctagtggggacgtggagaacttttgtgtctagctcagggattgtaaacgcaccaatcagcaccctgtcaaaacggaccaatcagctctctgtaaaacagaccaatcagctctctgtaaaatggaccattcagcaggatgtaggtggggccagattagagaataaaagcaggctgcccgcgccagctggggtaatctgcttgggtccccatgcacgctgtgcaggctttgttcttttgctctttgcaacaaattctgctgctgctcactctgggcccccactgcctttatgagctgtaacactcaccacgaaggtctgcggcttcactcctgaagccagcgagaccacaaacccactgggaggaaggaacaactccagacgcgccgccttaagagctgtaacactcaccgtgaagctctgcagcttcactcctgagccagcgagaccatgaacccaccagaagtaagaaactccaaacatatccgaacatcagcagtagcaaactccggacacgccgcctttaagaattgagaattgtaacactcacggcgcgggtccgcagcttcattcttgaagttggtgagaccaagaacccaccaattccggacccagctgtcttttgggcattgtccggaaggccggctgtagtattctgcctacagatacttgtcaagtgctcatggacagaagtcgtagttggggaggatggctgcaaaggcacaatgacatttggcttccagaaattctaagtactgtgccgtgagtcaggtcaggtcagaagcactggggatggaaccgccttgcattggtctcccagccccaactttgtatttactgagttgtgtgctgcaagatgcagcccatcagaattttacagagcatggtcggatgcaggcactcatgcctgaattccagcaatttgggaggccaagacgggtggatgacctgaggtcaggagttcaagatcagcctggccaacatggtgaaaccccatctctactaaaaatacaaaaattagctgggcatagtggtacgcacctgtaatcccaactactcaggaggctgaggcagaagaattgcttgaacctgggaggtggatgttgcagtgagcagagattgcaccactgcactccaagcctgggtaaaagagcaagactccatctcaaaaaaaaaaaaaaaaaatgttacagagcaaaccggggtctgcttgcccagcgtggtaagaccagatatccacaccgaggtgttgcagtggaagaaaggagggtgtttaattgctgggcaccaagcaaggaggacccggcggctcatgctcaaatcctgaccagtagcttgcaggtaagggtttttaaagtcggaggtacatttcaggaaagaagttacaggtaagattgtaaaatcgacacatggcggttgcacagtggttttgaccgaaaagggcggctatcttcaagccaggggttacaggtcgtggatggatttaaagatcttctgatttgcaatcacttaaggaaaagaagctttgtttaaaatgttggggtcggcaaaaaaaatgttagctctggcttgtgggcaggactccctccaggaccctcaggaagaaatttatttatttatttagagataagagtctcattctgtcacccaggctggagtgcagtggtgtgatcttggctcactgcaacctgtgcctcacaggttcaagcaattctcctgcctcagcttcctgagtagctgggattacaggcacgtgccaccatgcctggctaatcttttttgtatttttagtaaagacggggtttcaccatgttggccaggctggcctcgaactcctgatctcaagtgatccacctgcctcggcctcccaaagtgctgggattacaagtgtgagtcactgtacccggcccaggaagaaatttagaaccaaaagcagcagtcagagttgagtcctcagttccccctcatctgaggtctctgtgccagctgattcattccgtagggggccgggtttctgaaaaacaactcagagacatatgttaagatgttatctttagtttctatagggaaaccaaacatctcgtaattctagcttccttggctattgttttaagctactattaccttcttgcttatcaagtcacttatttacttctcagggctaacttggtgctagcttggaatttcccttgaaggaactcaagattttcctttatttccctgctgggggtcccacagacccgtacaacgggttctctgctgcatctcaagaaacccccggtgcgacctatgtgcatgagcacattcctgtatacctgggaagaaagagctgtgtgagcacgtggccccaggtgccacccctaagcaaatggtcccttttcccccttgcctcatcttctggaaagccgagagcccagtcagtgttgccggtagccagtgtgcgtgtggagatttgttgcagctcctctctgttcctacttccatttttcttcttgggtccaggtgggatgtgcagacgcatgaatgtctgtgcagggaggcatacctgagtccccatggaagtacatatagcatccagacagtctcagaaaggcaggggcgttattcaggtggagcctaaagggtacctggccaggtaggggaagcaggacctccgaaaccttcttatagggctctatcttcaaagcatgtggttgtcttcagcaccattggcaaaagccattaccttctcccccaccagggatttcctgctttttttgcccacctcagggaaggggctccctcctgacacctcactcccaggttaagcaaggttaggatcacccaggggatgagtctgttccaggagagcaggacagaccaagtgtgggggatgaaatcctaagcgccactaggccaaggtgggtaatgagccaggagcagtggcggagcagtgcttccttccactcctgctgaggagcgctgggaaattatgttacctaacctccttgaatatatttccttatctgaaaaataagaggattggaaccggacctccatgttcccctgcaataccaacagtcagtgattcagagccttgctactcaaagtgtggtccgtggaccagcagcctcacgaagctcgttagaagcgcaggatctcggcccctaccccagagccactcgatcaaaatctgcattttaaaatcctcaggtgattcatatgcacgttaaaattcaaaaaggactagttgagacagcccctaaggtacatgagacatcctatgcgtcccatgcaaggtaatttggacactaaggaatcacgaagtagaagtggctcacagccagcagtggtgctctcctttggtacgggccagaatcagcctgggagattgtaaaatacggacgtccaggtgtgcagggccacagtgctgggagaagccagagcagccccttggagagagaaaacacaaacacgcacacatgaaatcgcttaaggatcactctgggcaacaagggtgactgtcctagacacagaatcagggtgagccgagggcagcagagcagagaccgtggagcaggcctgtttacccagtgctcccgaaagacggcttttcatccttacattagaatctcttcctttagttactgaggggcctctcaggggaatctgtggttacctctccaccttctttttttttccagacagtctcactctgtcacccaggctggagtgcagtggcgcaatctcggctcactgcaatctctgccttccaggttcaagcaattctcctgtctcagcctcccaagtagctgggactacaggcacccaccaccatgcctggctaatttttgtatttttagtaaagaggggatttcaccatattggtcaggctggtctcaaactcctaacctcaggtgatccacccacctcggcctcccaaagtgctggaattacaggcatgagccaccacacccagcctctccaccttcttaagcaagaatgcagaagattgcagggagggaagactgttgatgttgttgcttgttttaagatggtcaggtgcagattgcataaatatatttgcatattctgaggaggaaaagcgccagagacgtggacattacaggatggaggggtgagtgtagggcagatcccttggggaggggagcggtctactgacctgtgaagtgttagccttggctgagaagatgccttcagctgcaagtgacagatgacccaacaaatatggcctgaaccatgaggagtacattatctcatttcaaggatcaggaatagacttccaaggacccacccagctcaaggatccaggtcattttctccactagactagtgaccgtgtccttggttgattccccagtggttttatggctctggcagctgcaaacacaactcaaggtggccaaagacagagctttctccccttgtccctccgtcggggaggaaaaccctccctatgagtccctgcagatttcccctgatgtcccattgaggaggacaaggtcacgttgtcaggttcacaactataccaaatgccctgcttggggtcaggttccagcccatgctgaggttcgaggggagtgggcggatgggcaggtagctgaaggaacactcgtggggccataagcaggtgaaatgtagttttactcaacaggtctctcagcagctgactcataccagctctctcacactgtccgccttgactcagctgtctgctctggctttgtggctcctctcagcagccagctcccacacatagctgcatggccgactctcccctgccttcggggtcagcagcttaactctttctctctctgggcacgagctgaactgtgctgtgccctggctccccctgtctacctgcaaaatggacagctttggctctttctctgggcgccagcatgcctgtacagtgtcagcagggcaataatagcttttacaaacaacagtggcttagagccaaatgatgagccttccgatgttatggctatatggctgtgatgacaagtggagttatacgcctgcgctctaaacttgctgagtcactctggatgtttacctcagcctatccttgaccaaagcacagccatgttcctgacacgcgtgctctggccttacagcaagggaggcaagaaagtgagtctgccattgtcagcccctggggaggaaggagggccctgccggcagggcagcaagtcgggagcagctgtgggtggtgtcctacaggctctgctgtggaggaagagctgctgccctgagtggaggcaaggatggatgtgggtgtggagtggagtaggtggggtggggaacattaaggagggttctctgctaatggccattctgtgtagacagaggggctgaggtcctctgctgaggaggaaaggtcagaggtgatgaggaagtgatgaagactggaagaagaggatgaagggagggggagatgatttggggcaaggagtcctattgccaggtagctctgagggcctcgcagaggctggattgtggatgtctgatgggcagagtttagtggggggggtctctccagcagcgctgagcagccccttcgtgagtgtggagaggggaggagttgggtccataccgaagcaggttttagggacagaggaaagggccagagaagcagacggctcttgggagacagtggtggtagttgggtcatgctgttgaggctaagtatggagccaggggaggaggaagcagcagagaaggggctgagggagaagctggggtcggagagcacagcccccgctgggggccaggtccaggggcctcggctgtgggtggcagacatgggctggagagtggacgcacatggagggcctgagagggaggccatggagggatggaacccccagagggtcacccacccgcttattttatctccagcgcacaacaaggaaagcacagtgcgctggtgggaccttcccacaggaagcctccagccagaactctcctctgcggagagggtagggcatgtggaaaacgagcccttcttttgaacagcggaagaatgaggaagggctgagggatcagggccgtctgaacagcgcctgggagggagagaggtgggcgcagctgcaggggcctgacgggactgagagtcggctctgctgctttccccggtaacgttagctgttccctccccgccacatgacccacctgtgcacatgtgcacacatcctcaaggactcacacttatacccacacactcacactccagacacaaacacaccccccacaccctctcacacactccatacacttacacacacgttcaccccgcatgctctgagacgtgcctgtattcacactctcaccttcacacacacacacacccccaccccacactctcccacactcaccctcacccccaccctgaaccctgacccacacccacacacaccctcacacacagacacccaacactcgcacacataccccacagtcacacacacacccaacaccctcccacactcacactccaccccacattcacacaccccaccccatgccctcccacactcacactcaccgccaccccacaccctcccacattcacaaccccaacccacaccctgacacacacccacaacacacccacctcacattcacacacccccaccccccatccacactctcacactcaccccccaccctgtaccctcacacacgctcacccaccctcacacacacacccccacccctcaccctcatacatgctcacacacgtgctcacacacacactcacacacaccccacccctgaccctcatacatgctctcacactctcacacacacacacccctcaccctcacacacaccccaacccacaccttcacacacactcacatacactgtcatcacacacaccccacctcacacactcacactcacccacaccctcacacatactttctgtcacacacactcacccccacacactctcacacgctcacccccaccccacactttcacacactcctactcaccacagactccctcacacacagtgcagagccctcccctcctccctttgccctgctccatgtcctcttggcttcacccctgctgatcccaaactctacctcctcctcccctgaacctcccccaactcctaaatgcccaagtcaaagacaaggggcgagagggatggagtctagaatggggagagcaggatcaagatttgaaggcagtcactgtagggtctgtagtaggctgttttgtgttgctgtaaaggaatacttgatactgggtaatttctaaaggaaagaggtttaattggcttatggtcctgcaggtggtacaggaagcatggcagccagcatctgttcctggtgaggcctcaggaagcttccactcatgcagaaggtgaagggggagccatactatcacacagcaagagtgggagcaagagagacagcaggaaggcgacacacacttttaaacaaccaggtcttggatgaactcagagtgactttcacttatcaccaaagggtggcgctgagcccttcctgactgatctggccccgtgatccagtacctcccaccaggacccacctcccacattgggaatcgcatttcgtcatgagatttggagggaacaaacatccaaatcacatcagagtccttttttcattgcatcagctgggaagggttgggaactagactgtgtctcctccctcattttgtgtagacacacagcaacgcagacacacatcagcacacacacacacacggagagatggccacacacagactggcacaaggcctgcacgagcaggcacgtgggcacatacagacacacccaaggacacaccaacacatgtgcaggaacgcgtgcacagttctgctgagtgggggatgaaggggatgttccttggatttcaaagctcccaacttgtcgtgattctccttcccttgttgttgagttaaagttccaaactaagataaggacacacatctattaaactctgatttgggtggctgatctgtcttctaacgagaatattttacttttcaaaaactgcctttggacaaatgtagttgccattatgcctttctgggccagagaattagttcatatgtgattaaaacccacagagagagtgggtcccatacactaacctactggccaaatagaaaatttcttaaaaattctaaatgttttgtatgaagcaagtataacattgatatttaaaccagatgaaggtagcattaaatgacttaatttattacttaagaatagtactgaattccaaaattacttaagaatcttgatgcaaaaattatcagaatgttaccttatagaatttggtaatatatcacaaaagtaaatatgcatttacctttgacccagtaattccagaaatgtaccttgaagacacacccccacaataatatgagaatatagatgtaaatgcccgtaaatatatggattgaaaaatatacagtatatccacacagtggagtactgtagtatgtagttctaagaaagaatgagtatgatcttttttgcatatcagtgaactaatatgtggtgctttctaaaatgtattgctaaatataaaaacaaagttcaaaagcacacacacgttatctttttgtgtaagaaagaaggagaaatgagaaaacatatatgtaactgcttactttctaagaaaataaacacaggaccagcctgggaaacatagcaaaaaaaaattttttaattagccaggcatggcggcacacacctgtagtctcagctactcaggaggctgaggcaggaggatcgcttgagcccaggagtttgaggctgcagtgagctgtgattgcaccactgcattacagcttggatgacagagaccctatctcaaaaagaaggaaggaaggaagaagggaaggggaaggaaaggaaaggaaaggaaaaggaaaaagaagcataggaaagaatagtctggagtccaacgtgatgggaaggaaggaagaccagagggagggaggaagggaaggagggagggaaggaaggaaggagaaaaaagaagcataggaaagaatagactggagtccagtgtgattggttgcccataggaggtaggtgggaggggagaaaaggattggaatgggcagtgaaagtgacacctgtgtgaatatcaatttgcatcattttaactttgaaagtatggttgctgctttacatactcaattaaattaatacaataaagtccaacagttgtgaggtgggaaaaaaacctaaaactgaaataaaatataaacagaagcagacgaataatagatggtggccagggcctcttcccacctcatctgtacctttgggagccagtgtcacttgtgtttctgctctcagtgacctgtccccagctctcaggctttagttttaggcttcctttgaagcagattctcattagacggggcaattgcaattgtgatgtgtgtagcacatgctttctgtgaaacaggtagcactacactggtcttagtcacggggcatcaatgtgtgtagggttagggagaatttcttctgcctccctctagaaaataaatctatgcttgggatagggaagaaagagagagagagtgtgtgtttgtgcgtgtgtttattgttgaaaacaaactctcaacacaaagtctgtaaactttttggaaggacaacaaattaaaattaataaagcaattttattcattagaaatgtgtgttatgagccatagattgttaggagaggccatttgagacactcggctaggcttcaaagctttgagtttgagttctggatccacaaatgttggctgtaggatctttggctattggtttaatttctctgatttttgcactttcttcctttgcaaaatagaaattaatattgtcccaccaactgtatgggctgctagagcaatgaatgagcaaacgtgtgtgaaagtgaatgatgactcaaagcactatacgaatgtccaagcattacttatggtcgtggtggtgatggtggtggcagtggtgggggtgatggaaaagtcattctggaaccttctgttctcttctcactgtccccgggactgagaaagtttttccaaacaaaagcatcatgtcttgctcctcttactcgaatgaggcattcctttctcttatcccaggagggttttctaccaaatgctgtccatgctcccagatgctccctggcttggacagagaagctgtaggtggtgggaggtggggttcccctacccttggaagagcagctcttctaacccttttactttggttacttctaggggcagtagaatgaaagagggcatgtctaataacagcaccactagcatctcccaagccaggaaagctgtggagcagctaaagatggaagcctgtatggacagggtcaaggtaagcatgcatgcgtcagccccaccctccgcccgaagctcagctcaaaacattcctcctgcttccaaagcagacttgtgagagttaacacgtcacccagcagagcatgcagccaaccttggcagctgtaacatttacaaatgagtgtttgcttcacagttctaagtgtgcccaaggattcaaaggatgcaaaatacacagtgtgcatgaattccataaggagtctccaaaaatagactcataattcatctcggctctatttagctccgttgtcatgccaataagcaagaaagagagtttagcaatgagatcaatcacttttctgctgtgatacagtgcctttgaggttcaacaacatcggatattttgacaggattattgttgagggtggagctctgaaccatgcctgggtgtgtcaaatattcctttggtgaaaatgaagaaaggttccagacacctcccgttgtattcatttcactgatgagtgcaggtctctccacgctgggaggactgcagcaagatgaagccacctcttctccagatgccactcagaggtgagcagaaggccaggcaaagcatgtggctctgaacgagtccgtgagcatgacgctcgttgactgtaatagagttgaaaggaaccccaactctggtgtcgggaacctgatgccaggaagctccatgtgtctgtggtcttggggaacacaaatcagaggtctcacctgggcatctgggattcaaaaaacacagaatccatggcaacgggcgactcctgaagccttctatggacagagcctccctgacccctcccctcatgctagtgtatggctagaaagcaccaatactcacctctgtgtggacagttattcttttcccctggagctctgggggtacaacctctccaaggaggcagaaaatatgcacggaaagttacatgagggtatatgaagcaaggaaggaatccagcgtgatgtaagtcagtatcaccggacccatgttactagagcatctacatctcatacataccgataccaactgcaaattacatgtcagtccttggtctctagactagaggagggagcaagtttagaacccagaaaacaattctaagacacagcgggtcccaatagcatagaaaggggtttcaaatgaaagctgcaggcatcccgtgctccagaagtgcagacaggaaaaaggatgaggactgcagtgaaaggcattgctgagcacctaatctatacttgaagggtcctgggagagaaatgtgaaggcgacagtctcctccgtatggctcagggaagacttctcagagttgtgagctatggctggctctgagctgatagtggaggaggaaaggccggtgtgagctaatcacggctcgtgtggagcagctgggcagcgggaggagctgcaggttgtgctgggaagagagctatgggaggagggcgccatgcacacaggtgcggaagccacagccatgaggtgacaggtgtgtgaggtgaaccaacctgtaagcaatagacggagttgtcagaggtgaggaggtagttgaagctctgagtaatcaagagaggcaaggaggggcagaaatcgggtacagtgtggagcagacagcaaagatgcgatcggggaggcaaacacaccaagaaaatcaacagaacatggagagtaaacgtgggaggcactagggagagagacgttagaatccagctgtcaagccccatggccagagacctgaaaagacagtgggccccagtttgggctataaggcagttctcctttgcccaggcgttctcttctggcaaggaagataaattctgcaatagcatcttcacctgccacagacaccgccccaggagcccctgtgaggaccgggtgtcttcaagaatgaaggcttcttcaagagtcacttaggcacacacactgtcactaaaagaaagaggaaagtcaaagacaaatgagttactgtaggagttcattctcacattgctgtaaagaaatccctgggactgggtcatttataaagagatttaattggcctgtggttccacaggtggtccagcaagcatgatgcctgtatctgcttggcttctcagggcggagggtgcggaggcctcaggaaattgaaaatcatggcagaaggtgaagggtaagcaggcacatcttacatagcaggagaaagagagagaagggggaggcgatacacaccttttttttttttcttttttgagacggagtctcgctctgtcgcccaggtgtgatctcggctcactgcaagctccgcctcccgggttcacgccattcttctgcctcagcctcccgagtagctgggactacaggcgcccaccaccacgcccggctaattttttgtatttttagtagagacggggtttcaccgtgttggtgaggatggtctcaatctcttgacctcgtgatccgcctgcctcggcctcccaaggtgctacacacttttaaacaaccagatctcttgagaactcactcactattacaacaacagtaccaagggagatggttttaaacccttcatgagaaaccacccccatgtccaatcacttcccaccaggccccaccttcaacactggggattacaatttgacgtgagatttgggcagagacacagatccaaaccatatcagttactcaggtgatattcaatcaaagggataggcaggccagatgtggtggctgacgcctgtaatcccagcactttggaaggccgaggcaggtgaatcacctgaggtcaggagttcgagactagcctagccaacatggtgaaaacccatctctactaaaaaatacaaaaattagctgggtctggtgacgtgtgcctgtaatcccagctacttgggaggctaaggcagaagaatcacttaaacccaggaggtggagtttgcagtgagccaagattgtgccactgcacttcagcctgggcaacagaggaagaccccatctcaggaaaaaaaaaaaaaaaaaaacaaaaaacgggataggccgccatgttgctgtgctgaccataatggaaacgtgaaagcaagattcctcagggggcctgccagaggctaattcagatcctgtggtaattccagggagtaggccagtgacagctgtgtcagatttggttcagaaacagagttggtggaaacagaatgttgtcattgaagagacaatgcctgaggagagagctgaacctaggaaccgcatctgtgccaaagatgcgtgagcacacatgggtggtttttgtttttttcttgcttggacacccttgaacattaatttttttagttgtggtaaaatatatataacatacaatttatcattttaaccatttttaaatgtacaattcatcagtattaggtacattcacaatattgtgcaaccatcaccagcatccacctccagaactttctcatcttcccacacagaaactctgtacccattcagtgccaactccccattcgccctgcccatgcctggtgaccaccgttctacctttttcctctgtgaatctgactacactaggtatctcatataagtgggatcatacagtatttatctttttgttcctgtcttatttcacttaacttatcgtccttaagatccatctatgttgtagcctgtatcagaacatcattccttttcagggctgagttgtattccattgcatggatagaccacattttgttatccattcatccattgatggacacctgggttatctccacctttggactattgtaaataatgctgttaggaacatgggtgtgcaggtatctgttggagtctttactttggttcctttgggtacccacaagtggaattgctggatcatagggtaactctatgttcaacctttttacctttttttttttgagagatggagtctcactctgttgcctgggctggagtgcagtggcatgatctcagctcactgcaacctctgcctcctgagttcaagtggttttcctgcctcagcttcccaagtagctgggatcacaggcatgagccactacacccagctaatttttgtttttagtagagacagggttttactatatgttggccaggctggtctcgaactcctgacctcaggtaatctgcctgtctcggcctctctaagtgctgggattacaggcctgagccaccatgcccggccttatgttcagcctttggaggaactgtcacgctgcttacacaggggcttcatcacgtcacgtcatcaccagcagtgcacaggaattcccgtttctccacatcctgaccagcacttgttttctgggtttttttttattaatgtatttacttttttttttttattaatgtatttactttgacaagtaaaaattaaagtcactcactatcatgacgacagtactgagggggatggtgtatatttatggtgtacaacatgaagttttgacataggcatacattgtggaatggctaagtcaagccatttaatgtatgtattctctcacatacttagttttctgtggtgagaacacttaaaacctattctcttagcaattttcaagtatacaatacattgttattaattgtagtcaccatgatgtgcaataaacctctcgaatttatttcttctaactgaattttttttttttttttttgagatggagtcttgctctgtcacccaggctggagtgcagtggcatgatctcggctcactgcaacccctgcctcgcgggttcaagcaattcttctgcctcagcctcccaagtagctgggattacaagtgtgcaccaccgcgtccagctaatttttgtattattagtagagacggggttcgccatgttggccaggctggtctcaaactcctggtctcaggtgatccgcctgccttggcctcccaaagtgctgggattacaggcctaagccaccgcagccagccctgaaactttgtgtcctttgaccaacatctctctaatctcaccaccccacagcctcaggtagccaccattttactctctatttctataaatttgacttttttacactccacatataagtgagatcatgcagtatttgtccagtgcatggcttatttcatttaatataatatccttcagggttacccatattttctcaagtaataagatttccttcttttttagggctcagtagtattctattgtgtaaatataccacatttgctttatccattcattcgctgatagacacttaggttgattccataacttggctattttgactaatgctgcaatgaacacagaaacacagatctttctttgacatactgatttcgtctcctcgggttatatacctagtagtgggattgctggatcctatggtagttctatttttaatttttgaaaaacatccacagttttccaaaatggctgtactaaatttaattcccaccaatggcataccacggttcccttttctccaaactcagcaacacttgtcatcttgtgtatttttgataattgccatcctaacaggtttgatgtgatatcttgctgtagctttcatttgtatttccctgatgatctagtgatgtctgtttttttaataatagtcaccctaatgagtatgaagctcacacatggttttcagccctaggcatccctggtttcagggcacagtgtggctttgcagaaaaatctatgtgatgcaagacttgaaagaaaaaaaaagaaaaggtgcatcttggtatcagccagactatacgaatgtggaaagaaaggggagctgtcaaggacactcccgatgacctcgtcaaggaccttgaggagggaagagagaggaagtcaccagggaaaggcaatggcctttctgggatgggtacgaggttactgccagagaggaggaaggaaagagggaggctggataggaaatgacagagggcagccctggggaaggaggagaggagcagtttttagaatccactgaactcgcacacaccatgtcagaaacaccagggccagatgacaacactgagatgggccgggcgcagtggctcaagcctgtaatcccagcactttgggaggccagggcgggtggatcacgagttcaggagtttgagaccagcctgaccaacatagtgaaaccccatctgtactaaaaatagaaaacttagccgggcgtggtggcacgtgcctgtagccgcagctacttgggaggctgaggcaggagaatcactcgaacccaggaggcggaggttgcagtgagctgagattgcaccattgcactccagcctgggtgacagagcaagactctacctaaaaagaaaaaaaaagaaaacactgagatggattttccaaggaagaggaaaaggccaggcccatactgactgcatagtgagaatgcctagcaggtgaatgtgcacacgacgatagggcaggctgcatgggaaccagctggagggtccatggtaggaatcgtggcaactcccaggcccacagagctggcttccaggtgagagcacggcagatgggaacccaaagaggacatcccaggcgagggcaggtaccagcaggaaaccaaaagggagcccccgggatggcatggtatgtagccaaccatagggcccaccaccaggctctgtagcttattgtgctcaggagagtttctaaggaggaaggaaggaaaagaaggcatttgccgcccaggaaaataaggggacatctgtcactgggaagagaaaggaaaatataactgcattaagcagttctggggttgcagaagtaagaaagagtaatagtgccaattcagagagctttgcacgattcatggaggaaaaacgtagctgaaatattcattattgtcttgaagttctgcttgtccccatttgcacaaaagcacaagtgcaaatatagacttcagtaggggatatagattgaggcattacaccacaaagcccacagcaagatcttaaacccacacacagtgtggttcagagacctccttcctacctccattcatttaatatttatcgagaatcccctgctacttggcccttctcccaaattaccacccccactccatgtgactcttcatcttgcctagaagcacatcaaagcatttcccaacaaagatgtgtgttctttgcaaactcttatcagcagctaaaaacaagtaatgtcctccaggttgtcgcaggcatgaggaggattcaccatagaacctgtatagcctcacaaaaagcacaaagcttggaaaataatacccaggtttctaaaaaagaaataaagagcacatgaaagatgaattttggaaactatatgggttctaagggaaagaataccatcatagccttattctttttctcacccatcagaagttcaaacaatctaaaactctattagaaaagtacatatatggttgggcgcggtggctcacgcctataatcccagcactttaggaggcagaggcaggcagatctcaaggtcaggagatcgagaccagcctggccaacatggtgaaacccctccctactaaaatacaaaaaaaaaattagcccggcatggtggcacgcgcctgtagtcccagctacttgggaggctgaggcaagggaatcgcttgaatccgggacgcggaggtttcagtgagcccagatcacgccactgcactccagcctggcaacagagtgagactctgtctcaaaaaaaaaaaaaaaaaaagtacatatatgacattgatcattaaatagagaaaatccgacaagcggttatggcaggtctgagctgagcagagtgtaagaggcctcactggagaaaacagtgtctgaagccagcctgcacagccacaatgcagagttcagccactgagaaggcgttctcccaagggtgaagtgcagcgctcccaggcagagtcaggacacaggctctcaggcgggttccacgctgccttccacgtgccatccctcagggtgccctgattctcctgccccacaggaaagggaaattgctgacattgggtcaatcctatgtctgtggctcatgaggctctggggtggacagacacccttgagcaagcccaactctcagccagggactagaagcaactgatggaatggccaaggaaaactggccaaggaacattctgcccagtctcatttgtcctgggagataatttcaacatccgtggggtgggtgtgctcacaattcctacaagggctgcccttaggctgagattaattttgtgagcacaggctttatttgctgagtattgacagatcaatatattgttgggcctgcgttctatagactactgaaaacatgagtgcaggaagagaggaatttcaggtgatggatgcactaaaagttgaagcccaagaaacgcaggagaactggctacacatggcccttgacttacaatggggctacctctcaataaacctattataaattgaaagttcaacttacgacattttcaacttacgatgggtttatgcggatgtgaccccatgggaagtggaggagcatactgaatgcgtattgctttctgccactgtaaattcgaaaaaatcattcagccagaccatcgtacgtcagggaccctctgtatttagagtgcgatagtgcagaaagatactgacatcaaagaaaagagattgtggcgaggcgcagtggctcatgcctgtaactccaccactttgggagtccgaggtgggtggatcattcgaggtcaggagttcgagactagcctggccaacgtggtgaaatcccatctctactaaaaatacaaaaattagctgggtgtggtggtgtgtgcctgtaatcccagctactcgggaggctgaggcaggagaatcactggaacccaggaggtggaggttgcagtgagctgagattgcgccactgcattccaacctgggcaacagcgggagactccatctcaaaaaagaaaagaaagaaaggattgtgtcgtgacagatactggcagttattaacaatcttccttcataaaaactaagaaaaatgtagagaaaacagaaaaagagaaagagctattttttaaaagggtataatttggtgcttaaaagaaaggagaacaaataatcaaaaaaataggaaatgcaaggacacaaaagttgaatttacaagtctttgagatatttctcgtatatactctctttattccgttgataatttatttaaaaccataaataaatgagagtggctcgaacacatacctaagcatggagcttacttaaagcgcttccaacaaagaagcagaacatctggtgggttgaagtgagaatgtgaaaaagtcatatccttttcaggggcctttaatgcttgttttgaaaatgatactacttctctgttcattaaaatggtacttgcttttttgttgttgctgttttttgagatggagtctctctctgttgcccaggctggagtgcagtggcgtgaccttggctcactgcaatctctgcctcctgggttcaagcgattctcctgcctcagcctcccgagtagctggaattacaagcctgtgccaccatgcctggacaatttttgtatttctagtagagacggggtttcaccatgttgtccaggctaggcttgaactcctgacctcaagttatcctcccatcttggcctctcaaagtgctgagattaggtacttgtttatttttaaaatttttgaaaaatgctgacaagtataaagaggataattggaatggtctataaccactaccttttgatgtttttccatctatatttgttttacatttattataaaactggggccataatgtacacttattgcttttttataacctgatatatcactgaacagtatattgtgatcatataacaaggtcaggaaatattctcctaaaatgtcatttttaatatctattttcccccgatgtacaataattaaccagtctcctatccttagacatttcagttatttccaattgtgagtctttttttatttttccttttttttgagatggaatctcactctgtcacccaggctggagtgcagtggcacgatctcggctcactgcaacctccgcctctcgggttcaagtgattctcctgcctcggcctcctgagtagctgggactacaggcgcccgccaccacacccggctaattttttgtatttttagtagagacggggtttcactgtgttacccaggatggtctcgatctcctgacttcgtgatccgcccacctcggcctcccaaagtgttgggattacaggtgtgagctaccgcaccgggccgtgagtcctatttttttttttatcatactttaagttctagggtacatgtacacaacatgcaggtttgttacatatgtatacgtgtgccatatttggtgtgctgcacccattaactcgtcatttacattaggcatttctcctaatgctatccctcccccctccccccaccccttgacaggccccggtgtgtgatgttccctatcctgtgcccaagcgatattgttcaattcccacctatgagtgagaacatgcggcgtttggttttctgtccttgcgatagtttgctcagaatgatggtttccagcttcatccatgtccctacaaaggacatgaactcatccttttttatggctgcatagtattccatggtgtatatgtgccacattttcttaatccagtctatcattgatggacatttgggttggttccaagtctttgctattgtgaatagtgccacaataaacatacatgtgcatgtgttgtgagtcctacttttaaggaagcactgcagcaagcatactggtagataaaattttcatgtctgattatttctttaagataaattcctaaggactgaaaatctcttggccaaaagagagatatatactgtcaggcactacataaaaactgttttagtcagcgacagactgcatatatgacggtggtcccataagattctagtagtgtatattttttgacccggcatggtggctcacgcctgtaatcccagcactttgggaggccgaggtgggtagatcacttgaggtcaggagttcaagaccagcctgggaaacatggcgaaaccctgtctctactaaacgtacaaaaattagctgggcatggtggcgcacctgtagtcccagcttctcagggggctgaggcatgagaattgcttgaacccaggaggcagaggttgcagtgagctgagaacataccacctcactccagcctgggcgacagagctagactctgtctcaaaaaaaaaaagaaaaaaaaaaaagagcacggtggctcatgcctgtaatcccagcactttgtgaggccaaggtgggtggatcacctgaggtcaggagtttgagaccagcctggccaagatggtgaaaccccgtctctactaagaatatgaaaattagccaggcgtggtagcgagcgcctgtaattccagctacttgggaggctgaggcaagagaatcgcttgaacccgggaggcagaggttacagtgagccgagatggtgccactgcacatcagagcgagactccatctcaaaaaaaagatatctagtactgtatttttaccttaccttttctgtttagctgtttagatacacagatacttaccattgtgtgacagttgcctacagtattcagtacagtcacatttctgtaatcctagcactttgggaggccaaggcaggaggatcacttgagctcaggagtttgaaaccaggctgggcaacatagtgagatcctgtctctactaaaaattcaaaaaagtaagctggatgtggtgcacacctgtagtcccagctacttgggaggctgaggcaggaggattgcttgagcccaggagttgaggctgcagtgagccctgatcctgccactgcactccagcctggatgagagagtgagaccctgtctcaaaataattaattagttaattaattaacatttaaaaagtttgtagcctaggagcaataggctataccctgtaatctataggctataccctattgtgtaataggatagaccatctaggtttgtagaagtacactctgtgatgttcttacagtgatgaaatcatctaacaaggcatttctcagaacatatccccgtcattaagcgacacatgactgtatacacaagaaagtgtttgagtcaatatcaaatttccctatagaaagggataccaatttatatttttatcagtaatgtgtgtgttttcccacattctccccccaaacaccattcattatgccatgcaaatgtaacagatgataataatagcggccaacatttactgagtgcttaatacgcgttgttctgaacaagtcacattaaattcattcaattctcacagcagtccaatgaagtgggtactctgttatatgaaggaggaaactgaggtctatgaagattcattaacttgcctaaaattcagcagctgaaaagtgatgagagcccagggataggaaaccagggagtgtgtctccagagccttcgctctcaacctttatgtcataccatctcttgattgctgacgcctcgttattttaacatacatttcattgactgttactggggttaaactaattttgtatgttaaattcttcttttgctaattggctattcctaccgtttacccaattttctattgtagtattgtagaatattttaaggccagcacagtgactcacacctgtaattccagcactttgggaggccaaggcaggaggtttgcctgagcacaggagcttgaaaccagcctaggcaacatggcaaaaccctatctcttcaaaaaaaaaaaaaaaaaaaggtatgtatatatatatgtgtgtgtgtgtgtgtgtgtgtatatatatatgtatacacacacacacatatatacatacatatacacacacacacacacacatatatatatataattagctggatatggtagcatgtacctagctagaggctgatgtgggaggatcacctaaacctgggaggttgaggttgcagagagccgagattgcggcgctgcactcgagcctggatgacagagtgagaccctgtcttttaaaaatttatttagactgggtgcggtgctcatgcctgtaatcccagcactttgggaggctgagagggggagtggatcacctgaggtcaggagttcgagaccagcctgaccaacatagtgaaaccctgtctctactaaagatacaaaaattagctgggcatgatggcgggcacctgtaatcccagctactcgggaggctgaggcaggagaatcgcttgaacccgggaggcggaggttgcagtgagccaaggtcatgccattgcactctagcctgagtgacggagtgaaactccgtctcaaaaaaaaaaaaaaaaaaaagaagaggtgaaactaacgagttggaaagggaggtggaaaagctaaggaaagaattggagggaggtgggagcaccactggaaagagtggagagtggcacacatgctgtggaaagccacagtgatgacctggagacaggcctcaggaaggtgcacaggaaacaaaagaaacagatggagtgtcagaccgaagcaattagaagctgatagaaatccagactgacaagagcattctcacatttgtatgcgaatattcctggcagagagaataaatggaatagaaaatactcttcaggatataacataaaacagcttcattaaataaaggaagacctgaatctgcaggtccaaactgcttgccgtattccagaaaagagtgtgagagaaatgatcgacacagacacaaatacagctgagggtcttaatctcaaaaggaaagagtgatctctccatcaacaaataagtcaatagcaaaaagcaaaacaaaagcaatactaataataaagagcccattaagaatataggcagaagaggccaggcgcagtggctcgcacctgttatcccagcactttgggaggccgaggcggacggatcacctgaggtcaggagttcgagaccagcctggccaatgtggtaaaaccctgtctactgaaaatacaaaaatgagctgggcgtagtggtgggcgcctgtaatcccagctactcgggaggctgaggtgggagaatcgcttgaacctgggaggcgttcaaacactgcttcagtaaacaaggaaagaggtcatgaggaatctagtgagccaagatcgtgccattgcactccagcctgggcaacaagagcaaaattccatcttaaaacaacaaaaaaaaaagaatataggcagaagaagcagtcagttaggacaaatacccctaactttgattacattctttttttttttttgagacacggtctccctctgtcacccaggctggagtgcagtgtcgtgatcttggctcactgcagcttccgccttcccggctcgagctatcctcccacttcagcctcccaaatagctaagactaggttttgccatgttgcccaggcggtctctaactcctgagctcaaacaatccactcgccttggcctcccagagtgctaggattacaggcgtgagcccccacacccagccttggtacattcttaatatgtgttaggtgcttgaattttcacaccagccctgagatgttggtgctatcagtaccccatttcacagacaagaaaacaggcccaggccaggtgcagtggctcacacctgttgtcccagcactttgggaagccaaggcaggaggatcagaagaggtcagaagtttaagaccagcctggccagcatggtgaaactccatctctactaaaaatacaaaaattagccgggcttggtggtgagcacctgtagtcccagctacttgggtggctgaggcaggagaattgcttgaacctaggcggagaaggtttcagtgagccgggatcacaccactgcactccagcctggacaacagagcaagactccatctcaaaaaagagaaaagaaaagaagaaaagagaagaaaaaaagaaaaaaaaaaaggaaagaaaaagaaaagaggtccagagttgtcatttgatgaaggaaggatacaaacccagaaccttgggtactatcattacactacagtgcctcacccacaaaggaggaaaatatcagtctggacaacacttccccacagttctgaagatgtcagcccaaggagaaacagcatctacaatgaattctctacccaaccaagtggccatttatgtccatggcaacatagatatattctcaattatgcagaagtttaaatgtaatgcaaatatgtgctgcttttctttagcaaacttattttattttattccattgaatttcactaaaggagatacagatgtgcataattatgttaatttacacatgataatatacattaagaccataagaaagctgagaaaatgcctgctcagtcaaaaggtcttcccgagcaggggctgagggtcttgcacatggctggatccacacacaatctgagtcataggaggcattgaaggcactgaaggatgggcttgatgtacttggaacagctcagtcacctgttttgatgcagggcctgttgcaggtgtgatgactagagcggggatcatgagtgctaaaggaatttgccaaggcagtcataggtttaaaaaaaaaaaagcagatttattagaaggaaagtatgttgcaaggaagcaacgggcagcacagcagaaaagggactgtctccaaaaaggcaggggctggaaggaagctttatagggtcatgctggagggggttcgtgcagttacagtcctgctgctggggctacgtgcagagtgagggaacaggatgttgtgcaagggcctgtttgtggttagccgtctctcagaacaattgttctccccaacctgggaccccttcctcattgttgcttatttatcaggattccacagagcccaaatcaatattatagaaatgggatcgggtgagacaatccatgtatcacctatgaatagactcaaaagaattggaagtagggtcttgaagagagatctgtacatccatattaatagcagtttattcacaatagccaaggcatagaagctacctaaatgtctatcaacagataaatggataaacaaaatgtagtgtatacttaaaacagaaaattattcagccttaaacaggaaggaaactcagacatgtgggacaacatgaatgaaccttgaggacactatgctaagagaaataagccaggcacaaaaagacaaaatattgtgttccacctatatgaggtacctagaggagtcaaattcatagaaacagacaggagaatggtgttctccagggcctgggggaaggagagaatggagggttgtttaatggaaacagagtttcagttttgcaagttctggagacggatggtactgatagttgcacaagaatgtgaaaatacttaatactactgaactatatacttaaaaatagttaagacgatgcatttgatgtcatgtatgttttatagaaatacacatatatgtgtatatatgtacacatatatttgtataaacatatagtcctataattaaacatttttttatgccgggtgcagtggctcaagtctgtaatcctggcactttgggaggccaaggtgggagaattgcttgagctcaggagtttgagaccagtctgggaaacatagcgagaccacatctctactaaattttttttttttaattagctggacatggtggtatgtgcctacttaggaggctgaggtgggaggatcacttgagcccagaagacagaggctgctttgagttatgatctcaccactgcactccagccagggcaacagagcaagactttatttcaataataataataatactttaaaaaaactgctttcaagacaaagttatctccaaatccagcttccatcgctatagagcattcagaaccaacaagtcttcgtgctgttggacctgctgtgctagagggcttcatgtccatcagatgaatattagcattccctctgagtctgtatgagactgggcttgatgcatccttcatagcacttgtcaaggcaccactcacacccagatcttcagcactggtagcatccccgttctcattagatagcaccgccattttcctcagtctctcctatcttttagagcagcggtccccaccctttttggcactaggaactggtttcatgggagacagtttttccacaggtcatgggggacggtttggggatgattcaagcattacatttattatgcactttattgctattattattacatactcaccataatgtagaatcagtggaagccctaagcttgttttcctgcaactagacaggacaggtgttgggagacagtgacagatcatcaggcattaggttctcataaggagcatgcaagctagattccttgcatgcgcagttgacaatagggttcacgctcctatgggaatctaaggcctccgctgatctgacaggaggcggagctcaggcggtaatgctcactcgctggccgctcacctcctgctgtgcagcctgcttcctaacaggccatggactggtactggtccctggcagggggttggagacccctgtttagagcactgttgaaagacagaacactcacgatttcactcaccatggagacatcagtgtgagtcaccactctccaaaggtgatctgcctccaaagtctatcactgggattcaaatgctctctgccaagttatagtttctgggtcaatattcagtcctagaattctgctcaattctttatcagtgtgatagagtcagattctcaattctcactcttaatagccttcagatttgggtatcagacaactttcttactccattgactgaagataccaaatggtaaaagggacctctgtccctctgtgtcagctcatggaatgcacaaacatcagcagctgccccaaaaagaacactaggtcacctgtgaggctgatgatgaactccataggaacgactgggcagtctactgcctcgtatttcaaaagttccaccctgagaagctgtcaaacctaagcaaacctaagtaggcacataccaccatgtccagctaattgaaaaaaaatttaatagagacgggggtctcgctatgtttgccagactgctctcaactcctgagctcaagcaattctctcaccttgggagcctgacgaagagcttgcaccagcccattgtggttgttctttattcccaggacctttggggatcttctagtcactgccatattgtgttttttgttgttgttgcttgtttgtttgttttttgaaacagagtctcactctgtcacaagcccaggctagagtgcagtggcacgatctcggctcactgcagcctcctcctcctgggttcaagtgattctcctgcatcagcctcctgagtagttgggattacaggcgcccatcaccaccatgcccggctaatttttgtatttttagtagagatggggtttcaccatgttggccaggctggtttcgaactcctgacctcaggtgatccgcccacctcggcctcccaaattgctgggattacaggcatgccactgcgctgggccaactgccaccctctttctttagcctctgacttgctcagagacgaccttcctgttcaggattcttgccagcaccatggcccgagtggtctcctgcctcctctggactctgcacatacatgtgtgtaacatgggatccagccagctgactgaatcgaaataacttccacacggggatggcatggtaggaaagaagttgcagggttattcaatcaatgtaaacttagaattaagaataactggctgggcgctgtggctcacgcctgtaatcccagcattttgggaggccaaggtgggcggatcacaggtcaagagatcaagaccatcctggccaacatggtgaaaccccatctctactaagaataccaaaataagccgggcgtggaggcacacgcctgtggtcccagctactcggggggctgaggcagaagaatcgcttgaacccgggaggcagaggttgcagtgagctgagattgtgccactgcactccagcctgggcaacagagctagactctgtctaaaaaaaataataataactatgatgaccactcttaaaaaaatgtaatttttatcattcttctcagaaatctatatgatgtaaaaataaatatttgtcagtagtagactatgacaatcctagaaaatacttacattaaaataggggagggagaagagaggagagtataaatatggcaacctgtcagtccaagagtctttattacaaataacagaagcttaccctggctgagtaaacataaaaggaatttagttagttggttagtttcaactttaattttagtttcaaggggtacatgtgcaagtttgttaagtgggtaaattggatgtcagtagggtttggtgcaccagtgatttcatcccccaggtagtcagcatagtacccaacaggtagtttttcagcccttaccttcctccccccatcacccctcaagtagtgtgtctctcgttcctggtgtctcctattcccatctttgtgaccatgtgtactcaatatttagctcccagttataaatgagaacgtgtggcatttggttttctgttcctgcattaattcaattaggataatggccgccagctgtattcatactgctgcaaaggacacaatttcattcatttttatagctgcattgtatttcatggtgtatatatactacattttcttatccagtccactgttggtaagcatctaggttgattataaaaggaatttattaaagggattttgaatagcttataaaattgctggaaagtctagagaagtgggcttaagattcatcttctgggaacagcactcaaaaccacactgcagaacagtctgaggaaggaactgctgcaatcaccacccagcactacatgctacagtttataccactatcactctgagccaggaactcaaccttctagtcaggaccactgccaccagaacaaaagctcctaatgtcttttccctcagatcattcaccaaagtctggcacatgtgtgtcagatagacagaaacaaagtcacatgtgccaagttgcaagattctgggaaggtgagtatttaacattttcagatctattaagagaaataattgtttccccacacgaggactcataaagtagatcattcctccaaccagagaaggggttcagttgctgggggaaaacatgcatgataattgtccagtatagccaatttcctcatatttcatagatgtgaatcaatcaatataacttcatttctgaaattgattaacattataaacatattaaggctataaagataaaacgctttttttttttttttttttttttttttttgagacagtttcactctgttgtccaggctggaatgccgtggggcgatctctgctcactgcaacctctgcctctgggttcaagcaatcccaagtagctgggactacaggtgcgcaccgctacgcccggctaatttttgtaattttagtagagatggggtttcactatgttggccaggctggtctcaaactcctgaccttaagtgacccgcccacctcagcctcccaaagtgctgggattacaggcatgagccatcacgcctggcctatacttcttaattactggagtacaagaaataaagaccatggaacatcaacagaaaacaaaagagaatgtaaaagtttcaaaagacaaaataagacagcagaaacaataccaaatacatctatcttaataataagtgttaagtgggaaaactaatttagattatcagatttaacctttaaaaagaatatattttgcattagacatagacctaaaataaagtgactcaggttgaatgtaaaaagatgggcaaaaatatatcagatatattcaatatgcacaagatctatatgaggaaaactacaaaactctgaggaaaaaatcaaacatctaaataaatggagagatagtccatgttcatggataagaagactcaatatagttaaaatagcagtttttcccaacttgatctgtagattcaatgtgatcccaatcagaatcccagcaaattttcttcttttttttttttctttttttttttttctttttttttttcttgagacagagccttgctctgttgcccaagctggagtgcagtggtgccatcttggctctctgcaacctctgcctcccagattcaagcaactctcctgcctcagcctcctgagtagttgggattacaggcccaccatgcccagcagctaatttttgtatttttagtagagatggggtttcgccatattggccaggctggtcttgaactcctgacctcaagtgatccacctgcctcgacctcccaaagtgctgggattacaggcatgagctgctgtgccccaccccaaaatcccagcaaatcttatcttgtggatattgacaaaatgattttaaagtttatatggaaagccaaaagacccagaatagccaataaaatactgaaggagaagaacaaagttggagaaccgacactacctgactgaaagacttactataaaactacagtaattaagacaatgtggtattggtgaaagagtagacgtgtaggtcagtggaacagaatagagagccccaaaatagacccatgtaaatatagccagctgatctttgacaaaggtgcaaagccaataccatgaagcaaagatagtcttttcaacaaatactgtaagaacaactgaacatccacatgcagaaaatgaatctagacacagaccttttacattttataaaaattaactcaaaataaattatagacataaatataaaagagtacactacagaacttctagaagatgacataggaaatctaagtgaccttgggtttggcaaagagtttttagatacaacagcaaaagcacaatccatcaaagaaaaaagtagacaagctagattacagtaaaatttaagacttcagtgaaaagcactgttaagggaatgaacacaagccacacgctgggagaaaatatttgtcaaacacatgcctgataaaagacttgtatccaaaatatataaagggccaagtgcggtggctctcgcctgtaatcccagcacgttgggaggctgaggcaggcagatcacctgaggtcaggagtttgaaaccagcctggccaatatggtgaaaccccatctctactaaaaatacaaaaattagctaggcatggtggcaggtgcctgcaatcccagccactcaggaagctgaggtgggagatcacttgaaccccagaggtggaggttgcaccactgcagtccagccgggtggcagagcaagactcgtctagaaaaaaaaaatgtatatatatagagagagagagcgcgagcgcgtgcaagagagcaagagagagagaacccttaaaacacaacaatgagaaaacaaccaaccacattaaaaaatgggcaaaatggccgggcgcggtggctcacacctgtaatcccaacactttgggaggccgaggtgggcggatcacgaggtcaggagatcgagaccatgctggctaacacggtgaaaccccgtctctactaaaaatacaaaaaattagccggccgtggtggcaggcgcctgtagtcccagctactcgggaggctgaggcaggagaatgtcttgaacccgtgaggtggagcttgcagtgagccgagatggcgccactgcactgcagcctggcgacagagtgagactccgtctcaaaagaaaaaagaaaagggcaaaatttctgatcagacacatcacaaaagatgacatacaaatggaaaataagcgtatgaaaacatgttcaacatcatgtcactagagaattacaaattaaaacaataagataccactacacacctattagaatggctaaaatccaaaaatctggccatattgaggaaaggttattaggatgagcagttctagaactgggatcagataaaaggggaaaatgcttcggattaaatgaaagagtagaacatgagtagtagaagaagaaaatgaaagttgcacttagaaagggatctcttctattcatggggatgatctggtcagggccattgtgggcatccaatgccctaataatttctgagaaacttcttcgtgtctgtttctcaagtatcttctctgtcctactagaaagtagccaaatgaataatggattaataaccccatgtgcttatgtttcagttggcttgtgctgctgtaacagaataccacagactgggtaatttatgatgcacagaaatttattaactcatagttctgggggctgggaaagggctacctctggtgaggggctacttgcagtgtcaccccacagcagatggcggaagggcaaggagagaggcagagagagaaaaaaggggccaaacccatccttttataaggagcccattcccatgataacagcattaatccattcatgagaacagagccctcatcacctaataacttctcattaggcctcacctcctaacatgctcgcattgtttccagaacatgcttttgggagacagcactttcaaaccacggcaatatatgatggcatccatttagccacaaaccagcaggtgttgccgttctcgtttacaggagtcaaagctgagtgcctggagtgtccatcttatccagcatggcaaacttgcaaagtgatggaattatggatttctttttggaaatttgggaaatatcaaaactgagagatagtcagtcagatgggacaaacactgacctgttgaacgggcttggttaagtcaaggtccagggtggatctaggtcaatcatattctaaacaagtgagggctttgatattcctgtgctgaaggccatgtcagaacaactcttacttaagttaatttggtgatattacaactctctttcaagcatcttagatttagctcccaatgtgcaatcaacttttgatgtggaaaaaaagcctatgctgaaagtagttaacagtggctagtctgctgctatggacatttgacttaagggttcagagacggactctgttgaattattcttttattcacacatatcacccaccctcctctctctggtttccaccttcaggtataacctaacccactctaagcttgatgttgcctgtggcctaggacccacccacagggcggaagcctctccccacacaggccatccgccaacaagtaagaattgcccacactgaccaggaatagtacgaagtagttactgggatcctctgaaagccataatatgaaagtatctagagactgcccttaggaactggtgtgtgggtctcaaatacttcccaatgttaggagaaaaaaaaaagcacaagagttcaccctgcagtgctttctgagaatttaaaggtgaggtatatacctgtaatgtccccaggatcccactgaggataagcagtatatgatatcttctagtggagtgtgcaccaaatttcaccgtgtaaaaatataccattatagaccttgtaaaatataccgttacaccatgctggctgcaacctggctgtaccattaactgtaatcctgctttgttttcttggagtaggagaaacaggcaaagccaaccaagatgcttttgattcccagtagtactgttaaatagaccagcgttgcttagaaataggtgtgggtctgtctacttcagatgcaaaggataaatgcagtgggtgtcacagccacaataataattatgtcatctgtcttgtcatggaatgtgactatagtaattgcggcattttctcccatcattgaagcttgtaattatagtgcaactaacaggattacgtgctaacttgggctgccttaatcacctcttttactctgaaatgtgatggtaaaattccacagttgttcccaagctaccaattcttttcaacatctgttgtcttgtaactctaacagttcaatactaagacggggaggcacagagatgctccaggcatttcatcacagtgaacttgagggaaagccgaattcaggcttgatgagaaaggatacacagtaaaggaatttgcaattttctaccagaataagattttctctttgaaagcaaattgtctactttatgttccaaagatggcagatgtttaatgggatctggcgttgtctgcaacccctatttggtacgtgttgaaggaaacctccaaccataaacatcaatctagggctgattaagaaaactctccctctcagcggaaggagcagactcaggttaattaatacctggatactgagctatttgttgggacgccacctttcatgtgtcaggctcatttagacggtcattacctatatttatcttttcagatcacattaacaataaacttcaggggttacccaagatactttggttataaaggttatataggactctggacgctatgtgaaaagacggggtgatgaaggtggaaaactcccttgactattttgctgtaagatgacttatgctgtattagatgcagctgtgcgtaagtgggccattcttcacagtgttacatttcagtaattctgagtgcacctaggaaattaatgtttcacggaaccaacccagatccacacattcgggcttaaactgagcacttcttgatcggcagtaatactggcttcattgtgtgtgcattcctgttgtatgggtgcacagacaggactcagcaagccagaggagtggttataactcagcaaacgcaactgtgatcttaaagcaacaaaaggaggcaatctaagaacaactcgttttcttgcaagaaaaattgtggcatcaggtacagtatcacctttgggaggtgagagaaaaattcctaggtgagacctgcttagacctggcaaggccagaccattaatagcataattgttagggtgttgcagacactgggctgtaagggaagaagttactctgctatggagtggaacatgggcccaacctgacttctcctcgactgagctgtcccccgaagccccgacattttttgagcccactcctttaatgcttggtcatgatgtacaggatgtactggttgatagtgcagcttccccagtgaggcgcccccttgaggttgctcctagagaattaaaagagtcgaactggcccatgatggatgttgataaccaccgggacaggtaaactgatcaatgggaagagagctatcgtgacagtttagccagccaacttctgaccagctggattgtatgtgtagacagaaggggattggcgggtcacagcctagaggaaggggtgtcttggagaccacagtggctgtgtccatcctgtacttctcagggccggggggaaagggggtgagtcccagctgaggacacctcctgtctctaggttaaacgaaatgacctaagacactctaggtgggagactctccttcttctggtcctgtgagctcccaggtagttgaaccacaaggatctctcctcgtgtgcactggatggatgggcaggtgagaatgttccaggccacttgagaattacgggtctcattgtcaattaacaaagcagctgctgtagtatagcggctgagtatagattctgtatacagtgtagattatagattctgtatcgagtgtagattctgtgtagtataaaacgggtccccaaccgccgggccatggaccagtaccagtctgtggcctgttaggaaccgggccgcacagcaggaagtgagcagcgggtgagcaagcaaagcttcatctgtatttacaggtgctccccattggttgcattaccgcttgagctctgcctcctgtgagatcagcagcggcattagattcttacaggagcacaaacccaattgtgaactgcgcgtgtgagggatctaggttgcaagctccttatgagaatcctgtgtctgattatctgtcactgtctcccatcacctccaaatgggaccatctagttgcagaaaaacaagctcaggcctcccattgattctgcattatggtgaattgtatataattatttcattatgtattacaatgtaataataacagaaataaagtgtacgataaatctaatgcacttgaatcctcctgaaaccatccccccacccccagttcatggaaaaactgtcttccacgaaaccactccctcgtgccgaaaacgttggggacggctgtagtacagtacagcttagcttcaaattctggctgtctcttttttttttttttttttttttgagacagagtctcactctgtcgccaggctggagtgcagtggcgcgacctcagctcactgcaacctctgactccctggttcaagcaattctcctgcctcagcctcccgagtagctgggattacaggcatgggccaccacgcccagctaaattttgtatttttagtagagacggggtttcaccatgttggccaggatgttcttgagctcctgattttgtgatctgcctgcctcggccccccaaagtgctgggattacagtccgtgagccaccgtgcccggccctggtttcctctcttaatagatgggtgaccttcttaacctttgtgcctcagtttcctcatctgtaaagtggctttaagataatacttatcatgtgtacttgaaaattgcttgccagactcagaggctcatgcctgtaatcccagcactttgagaggccgaggcgggcagatcacctgaggtcaggagttcgagaccagcccggccaacatggagaaaccccatctctaccaaaaatttaaaaattagccaggcatggtggcaggagcctgtaaccccagctactagaaggctgaggcaggaaaactgtttgaaaccaggaggcagaggttacagtgagctgagatcgccctactgcactccagtctggatggcagagtgagactccatctcaaaagaaaaaagaaaattgctaaaagagtaaattttatgtttttaaccacaaaaaaagtatgtgaggtaatagatatgtcagttagcttgatttagccattctataatgtatacacgtatcaaaacatcatgttgtacaccataaatatattccatttttatttgtcaattataaataaggaattctactttttttttttttttttagagacagggtcttgctctgccacccaggctggtgtgcagtggtgcgatcacagctcactgcagccttgaactcccggactcaagcgatgtccctgcctcagcctcccaagtagctgggactgccggtgtgcactatcatgcctggctaattttttcattttatggtagagtcttgttatgttgcccaggctagagtcgtacgtataagaagaattaaatgacataatacatctgatgcatgtagcatagtgctggcacctgagaagcactcagtaaatgtaaatgttagcttctatttgtattatggttttatccagctgcctcctgagcttgtttaatatgggtcagccacaagagatgatctattctgagtgtgccaggaaattgtgtttctgggcccagaagtccagtgattgccctctgaagaaagggggcagattcaccaaggtgtcctctactgtctgggactggacaggttgtcagatgccccgtctcctggcctctcatcatggatccacagtggcgtgcaagtgttcttttgtgacatttcagcacacatggattattatagtgacttcatcatgtttgagatcacagtgagatcttctagagggcaaaactgttgccttattctttctcttgcatcctctgaattagctaaagggtagatagtgaatacttcctttctgaatgacataacgaggattatagagaattcagatgaaactggagcatgtccaaaaaaaatgaagtagatgggaaaagtgaaaactagaaaactggagagggcatgatagtcagacgagacgttctttttttttttttttttttttgagatggagtttcactcttgttgcccagactggagtgcagtggcacaatctcagctcattgcaacttccaactcccgagttcaagcgattctcctgcctcagcctcctgagtagctgggattacaggcacccgccaccacgcctggctaattttttgtattttttgtagagacggggtttcaccatgttggccaggctggtcttgaactcctgacctcaggcgatccacccgccttggcctcccaaagtgctgggattacaggtgtgagccactgcgtccagccgagccattcttaaacggaactcccagaagagctcactggagtcaggggcctagacttagcaaacccaagaggacagtggctcctagaggaggaatgtggttgttccaacactgcagcccttgtgtgtgctgcccaggcagcagtgaagaccactgcccaggggttgccagaggggtcaatggatgaatttagtggctgtcctaacatggtggccatgagggagaccccagacctcagcagcttctgcatctctgggcatggtgagaagccaggagtggaaactaaggaggtcatcactccagcagttggggagggcacttggctttccttagaaggtggcagcaagggagggctcaatctcccaagtccaccggctttgagttgcagcactcaccatgtgattccattctcttgtgtgtccatcgcagccctgtgggcctcagagtccatttccttaagcctgtgctcctgctccttgtgatggcttcacaggccccccacaggctcagttttcccctgagcctcacccatctgggaaattcctatatgggcgtcctgtaacccactgcaaacttcaaacactcctattcaactcaacatacacgtttttaggatcttaaatactgaccatgctattaaaggtagaatcatagacgtcttagagtaaattgggaccttagagctctccaacgctcctgaattttacaaatgagggaagtgaagctcagaaaggttgagctgcttacccaaggtcacacagctagcttacgggcgggggtagatctagaagcctgatgttcaccggaactcatttctccatgccacattcttaacaaatgtaggttttgtcaggatttagactaactcatctgctaaacttcaagttgatttatttgagtgatgtgtttagttgattcattgtatatctctgctggaattatttctagccattgctaaagcggttaggtctgaaaatcagaagaatctctgtaaaatgctgaaagatgagccaatttttaaaacccagaagggaatgtgtatggcctgtgtagctggaggcttctaaacattttttttcttcatctgtggaacatttttatcattctggggaagatttagacattgaatgtactaaaaggatttcatttgactgctatgtatttacccctgcctgtaatccgctaataaatactcgcaggcagaacagcctaattggcaggatgagttaatgcacaggccatttatctgccaagcacatgacacagaccatgaacaaaataagctggtaactgcctctccctcttagcaaatgcttgtccgcaccccgccctctcccaacctgctcttcctctggccttgagcttggggacagtttgatgcacaactgccatgcgccagcaggcttcagataagcctggaaagaaatggaatggaaagaactttctggtcaggagcacctctctccgcagggaagtggccactccaagttaaaacatgtgtgctggctgggcacggtggctcatgcctgtaatcccagcactttgggaagccgaggtgggcagatcacctgaggtcaggagtttgagaccagcctggccaacatagtgaaaccccatctctactaaaaatacaaaaattagctgggcatggtgagtgcctgtaatctcagctacttgggagactgaggcaggagcatcacttgaacccaggagatggaggttgcagtgagcggagatcacgccaccacactctagcctgggcaacagagcgagactctgcctcaaaaaaagaaataaaaatgaaaaatgaataaaaataaaacgtgtgcttataaaatatagctaaatacaagttctgttgaggaggatgaagtgtctctctgtgttggtcacaagagtggattgcaataaaacaactaataatgataataaatatgatcacactggcttggccaggggctgccttctgctttagtcttccagaaacggtttagcaaagtcattgtgagactactgtcctggaacctccactcctcacctactcgagaatatatcaaggctgtctgggcctcctgccagccctcagtcctgtctccatgctggcctgccatgcgagggcagcctccccttcttggaggcccgcttcgaaccagtctcctagatctgcacaaaccctccctccagcctgggcatgaccatgttgtaggccgtgcacacaatacagcctaccctagggcttgtcccctctgtacgtggacacctcttccctggactcactctgcaaaggggcctttaactgagcacctgtgctctgtgccctcacaggtctcccaggcagctgcggacctcctggcctactgtgaagctcacgtgcgggaagatcctctcatcattccagtgcctgcatcagaaaacccctttcgcgagaagaagttcttttgtaccattctctaactccgtgtgtgatgaaaacgcctccttttctgaccttcaaagtcccctgtagagaccatgcatgctctaagccttagggagtgagaccaacacccatccctgcccagccaacagtggccggggcttgtcttatgtttccatctgttttcttcgtggcattcaatttcatttttttccttttcattttcatgttattttcattattggcaaagaaaatcaaaatgtttatagccaaataacaaatgtgccatgtaaaagtaagtctggacttaagagtttaaaatttttaaacatcagtttccaagtttatatcatattaatacatttcagtggataatttattttaaaaaaaaaactatgcctaaatatcccttatttgcaatattcagtatcaaattagagcattttgaccaactgaaacatataacgttttcatctcctttcctggagaaagcagctgcagaggttctgtatttcctgcatttccatcatcctagtaaaaagacaacaacccacaggattggaatggttttcttttgttttttttttgttgttgttgttgttttgagatggagtctcgctctgtcacccaggctggagtgcaatggcgtgacctcagctcactgcgacctccacctcctgggttcaagcgattctcctgcctcagcctcctgagtagctgggatcataggcacgcgccaccacacccagctaattttttgtatttttagtaaagacggggtttcaccatgttggtcaggctggtctcaaactcctgacctcgtgatccacccgcctcggcctcccaaagcgctgggattacaggcgtgagccaccacacccggccgtggaatggttttcttagcatatcctcctggggccgtggcgccccggctgtgggccgtggtggatgtcccttgtttcagtggtcctacaaaggtagatggtgggcggacaccgaagtcaacttgactgtaaaagtaccccataccgttgacgcgctgtggcagacctgtgggtgcggtctcccctctccaaatgccacctcttcctgctccctcctcttttggctcctactcagtagttccattgtgggctgcagtaatataaggacctgttctggacacagcactgggcccgctggggttttagtagggcagccccttccctgcaggagtgaggcatggtgacagcagtcccctatgtgcccccaagtcatctgagcattggtgtgcattaaggtactcaatcttccaacaataaataccataagtgcatgtctgttttattttatttatttatctttttgagacagagtcttgctctgtcgcccgggctggaatgcaatggcacaatctcagctcaccgcaacctccactcgcaggttcaagtgatcctcatgtctcagcctccctagtagctgggatgacaagcacacgccaacatgcctggctcatttttgtatttttagtagagacggggtttcaccatgtcggccaggctggtctccaactactggcctcgagtgatctgcccaccttggcctcccaaagtgctgggattgcaggtgtgagccagtgcacccggccgtatgtcttagagtgaggggaaactgaggcacaaagcgtttatgtagtttgcccaaggttacacatggtaagcagaaaaactgggatttgagggcaggcagcccggccccagagttcccttagccccctgaactgtgctaccttccaggtctacctgtttgcaggtagggagacccacaaactatcataactgcacaccgtgaagcaaacacctttgttgcagtaacccgtggcacacttcacttcccacattctccaggaggaagccgtattctggtagtttaaggaaggtgattcatggatgccccaaggaaaggctagacatcgatgaattagctcttggattgtctaagatcaacctgaaggtcctacctaaaccaaactcatatgatcccgatgaaagaggagaatacacagtgggagcagagctctttgtgtaagtttgttctattctgtttatttggaaactgcctctctccctagttctgaaagagacttgctgtgtgatagagaacaggccatttgtgcctgaaatgttctaacctgcaaattgggtttaatggtaattatcctgcctttctgtctgggaggaaacagagatgctacatagatgaaagctctgattatcatttaaaacaaataaatgtactaaatgccgtggtataatatagggaagaatggatgacttcaaagagaccatggttccgttggaggcataaaattgcctgcaaagaggcaaatgtaatttccagaccaattaatgacttgctgccctcgtaaatggatttaggacatctttgttccttgcttcttttgttaaaactcattcttagtttcattatcagctcactaataataccagtgttgttaagatgctcaaactagagcagaattgtatgctggatgtgacgctaggacctcagatcctttgatagtgcagttatgaccaggatctctttattctgtgcttcacgtcaacatcattaacccgatgaagcgaagcacaagtcataaaggcacatcagagaagccgagaaagcggggccgtacagagagcatcaaaatcaggtcagaaaaatgctgctttcctcttccaccaaaccttctccctgttgtttttacatgccccgtccctccagattcagcctccgttttgttctctctccttttccttttcctcctctcttccttaccttcccctgtgagatgcttttctgtccttttactgcacctcttccagacctatggcatttggggacgggtcacccttcctagagtgatcctgaatccagctgcctcttctttttttgtttttgtttttgtttttgagacagagtctctttctgtcgtccaggctggagtgcagtagcgcaatcttggctcactgcaacctctgcctcctgggttcaagcgattcttgtgcctcaacctcacgaggagctgggattgcaggcgcccgccaccacacccggctaatttttgtatttttagtagagacggagtttcaccatgttggccacgctggtcttgaagcccagacctcaagtgatccgcccgccttggcctcccaaagtgctgggattacaggcatgagccaccgcgcctggcctagttccctcttcttagatggagatttctgcacatgagctgtgagatccacagacatgtcactgagctcccccactctgtcagtggaagatgaatggaataaagcctgcttgcattgtggagtgcagctgtggggacagttgtcatttttgtgttttcagcttaactgtccagcatctcccctcccttcctacagcagggacatcatgccttagatataaacttagtggtgtgcagtacccaccgtggaagctgaagaagggaagtatttcctgtctctcaggcacaccccgcttccagccccataccagtcgggaagtggtcattgacctggggtggactacctggacccttgcttggggctatgagcctggagaatgtgacacaaatgaagggatgctgagactcatttcaaggaagccaccgtggtccggggttggtagtcatacagcaaggcaggtgggtagggctggcaggctgcagggatggtgtgtccactggtagcaatgtccagggatggcagcgtcctgggaatgtcatttctgctccactccttggactcgctgagctgtctccgcctccacctatcttcctacagacctcccttctagttttctgtcaattctttgagccagcaaactccatccagtacattctttcttctttcatgaaagagcttgagttggatgtaaatatatatgacctaacaattccacccctaggtgtataccctacagaaatgtgtacatgtgttcatccagagacatgctctaaatcttcacaaaaacactctccataataaccccgaacaggaaagcaccccaatgcccatgttggctggataagcacattagggtatattcacacgatggaatcccagactgcaatgggaatgagctgcaactccacccccaacttggagtgtattcaccaaccctagtgttgaacgagataaggcaaaaatgcaccataggattccatttatataaagtttaaaacccagcaaaattcatccatgcggttgcaagtagagatcagtcctaagaagacagtaaccagaagcgggcatgaggtggtgcttctggggtgttctgtttcttgatctggttgccggttacctgggtgctttccgtttgtgaacattcttggagctgtacacttttgatctgggcacttttctgtgtgtatgttatacttcaataaaaagttgggctttgtgactagc

SEQ ID NO: 283 - DNA, 3485 bp, Homo sapiens
gtggcagcggtgaccgcctcctgggttattttcttttctcccccagctgccccagggttctggtttcccgaatcacttggcaaataaccagcaggtgggcagatgtcttttttgcgttcctacggacgcgtaggcaagttcgatgcgccggagtgaacagccagggtcccatctctcagccggctcccgggcggtgctagcagggaagagggacgcgccggcgaatgaaacactactagcccggaaagccgccctggaccttccacccgggcagcgagtctggcggcccctcgccgccgccccctccgaccagaacagactgcgctgcgagccccgggcttccgccgcagcgcgcagcaattggaggtgccagaggagaccagcagcagcacttgatttagctgggctgcgggaattccgacctgtacactttccagaagcctgatctctccaagtccgcgcccagggactcgagccccggcttccaggttgacccgagcgcgcccccttcgtgctctcggccgcgttcaccgcgcgaggcctccgggtcctgttaagcccgagcaggtgagcgactgggggtggttcggcgtccgccgagacagagcctggccccgggggtcaccctggggtgctgcctggtacctcccaggtacccgcctcccggagccctaagagaggctgaaaaccacggacgctccaggactccgttttctgtacttttgagtaatttgccatcttttccttgcgcaattcgtacaaagcccttccgtgctcacaaagttgatgattgtgaagaagaaaatgtaggttagaggagaggaagcagcatcaggacaccttaccaccactgttagtaaatgacttgggggtacgggttgcttttccgatctgcaaagtaggagggaatgggatgtttgcagacgcagttgctaattgtgcctgagggcgtgggtgccttttgtaccgaaagaacttttggccgttttttcttgtattgttttcaagtcgctgcccgagtgtgtcctcagggcatcctggggaggagccggtgttgcggtttcggggcgcagccgaggccgccccgccgcctcccgtaggcgatcagacttcctctccctggcggttccgggaggagaacctcctacaacaaacaccgccgaagtttccctctccagcgcgatcgccaatcccaggagcgcccggcgcgtgggctgggaaggagccgagcggaaacctggaagtgagccgcggcgcaggcgaatcctgccgttgctggtggcagcgcccaagagaccccgcacagaaagtgggctgggagtctcgcttgctgtacccgcacctaagtgctcagaagcggcctttcgctctgcagagggggggtcttagaagcttggggaagaagcacattgtttcggagttccttgttgcgttctttctccttgggaggagggaattgcacaaggaaaagaagagaagcctttactttgtaactgaaattctccagagttgagttgcgtcgtacagactcggtgcatattttaatacaaaactaagggaagaggccatttgatacttggcttcatctcaaccgtcagccgggggtgacttcaaacagacgcaagattgggctctggggagtaaaaggaagaattaggatggcggttttcaagggaagttaagtctagacatgcttctttgaaagtcacaaggcagaagtggtcaaaagtagaatttaaaagaaccaaaacaaatatcataagcttgtccttctctcctactgggatataaattctcctaagtatctcatcgaaaaggctcctgggacgaaagtcgatgggggcaaatcttggagggaaatttcgtgactgtttgaccatggactaattaataccgttcacctgtagagaggatgcacttggttcccagcgccctcctcccaggtgcttatccaaagggaggccgccctgggtcggatgggtcaccttttggcgtccatctacagtcaagcagtgtggacagggcggtcattttccctctagagacgggttgattcagaggggtgggaacgtcccttgggtcccccgggcacgctgaccactgcactgcacttcccctgaaggaaaggcaaaggttgaagccaaagagttcaaggctcagcctagagaccaggtgatggtgccctggaagacacttccgccagcaccctatggggcgcagtggcgtctaatgctaatgtgggctacgtagctacgggattgggtcgctccgaccctggccgatccggtgccagacagcataagggaggaaaggggactggggggggcacgtgacttcaaccaacccagtaaccaagttttgttttcttccccagcacaggccgctgcctcagcatccaccccgcagcccacgtgtggcaagccggggaaggggtggagtgaacggccggagaccacgtggagaaaggggccgctttggcccttccatctgggtgccgggagcccctaggccctccggccatggccgacagcggcgatgctggcagctccggcccctggtggaaatcgctcaccaacagcagaaagaaaagcaaggaagccgcagtgggggtgccgcctcccgcccagcccgctcccggggagcccacgccacctgcgccgcccagcccggactggaccagcagctcccgggagaaccagcaccccaatctcctcgggggcgccggcgagccccccaaaccagacaagttatacggggacaaatccggcagcagccgccgcaatttgaagatctcgcgctccggccgctttaaggagaagaggaaagtgcgcgccacgctgctcccggaggcgggcaggtccccggaggaggcaggctttcctggtgacccccacgaggacaagcagtagccccaatagcctgcgcgctccaggactgcctacccagcactaccccaaacccccagttccaaacccgagacttcaggcccgcccccttacgcgttgtctcattccaccaaattcagaatatttacacaatgccttcatgattttatttttctggaaattgaagtgtcaattgggttctcaatatttcatgactccaaggatgcattaaatatttatttgtggtaagagaagatacctgccgcggaggagggtggcataattatttttttttcaaaaagctattctggggccctggccccctggctcctgtcacagctcagcttgaactctgtagcctctcaaatgaagaaggtggctgttatttaggactctgtggaaagcaaatcacagtgctgtttttaatgcctgagaaatgcactttaggggtagacttataccttaagtgaaggagtgggggaggaagaagcattcttaagtagaagcattttaaaataaggcaggattgcttttaatgttaaactacaaaactgtacagcctattttagtgtggactattaaaacccttgcactgtaagg

SEQ ID NO: 284 - DNA, 3555 bp, Homo sapiens
ctggagagaaagggctgagaacccggaggcggcggcggcggcggcgagccggggctgctggttcgcagggcggctagctcgcgaggaggcgcggccagagcggtgggaccggtaacaccaagagccgagaagacgcagggacccgggaccgcgcgcgggaggaaacgcggcggccgcccaagctgtcacctccagcctctcccctctcggccgcctctgccagcagccagagccggactcactgacaagccgcagagagagacacactgagagggagatgattattagttgcgttgagtcatcaggcaaagtgagtccttttgggttgtcctcggtttccgatttctccccctccccctttcggtccccagatctagcgccttcaaaataataatttggggtgggggtaggggaagtctctggattatttcgggatgggggtgggggggatggatctaaacccaagccagactggtccaccgcaagaaaagaggggagtggggggcggggaggagggctggggaggttgcggggggaggggggccccgcctggcaggaaattaaacatcaatcaatcaatcgctgtgagcacggcgacccaacggcggcggggctgcgaaggaggcagagggacaggcgaggggcgggtgggaggcagggaggagggaagaggaaggggagagtcggcggtcggagcggggtgacgaggacctcatgcacgaggcggcgaaggaccgatggcagagaaccgagtgcggcgcgaggcggtggccgcggccagcgggtgggtgcgtctgggcgcaggcgggcaccggggcccagggtctggtcctcctccttgtggcgggtccagggcgcggccgcctcgcccagcccctaggcgcactcgtcccggcgcggaggcggcggcgacaaggcagtcgctgggtgccgcgtctgccggcggagacgcagaccgacgcgcaagaggcgaccgcggctgcctcggctcccagctctgttaactgcgcggagtactttcgactttggagataggagggcgatcgcctcccccacccaccgcctccgcccaccacccaccgcctccgcccctccgagcaacttttcccggtgcctgcgagctccccctccgcgccgagccgaacgtcccggcccgccgcgcttcgtgccgccgcgcgcgcagggaaggccgcttctccttcaaagctggcacggccgcgagtccggaacaatagtcggggtgtcccgaatgccaggagcacggccactgcccgccgggctgtgggtggcacaggaatgggggttgcgtggtggatgcagagcggggtgcatccctggatggcatcgctggagcgctcgccgctccggcgacatcgcgagcggtgcaaaccgggccgcctggagcccgtgacgcggtggcggcgagggcggtggggctgcctgtcctcgggctacaggactggggctcctggggaccccaagctgctcgagcccagggctgctggcgccaacagagctgtgccctgaggacccggcctccccgcccggggggaggccgcacaggagcgtccccagcaggtcccgcgaaggcgtaacagagccacaaacttttgccgactcccgcggccgcggccgccggcagcccgactccggccgcggtgctcatttaaggtggcgcgggcactagccgagcaggctggcctctggccgcgcttttgtccctgcgattccgcttgggcgcgctgcctccttaaggaaaagcacgtgggcaggggccgcagcccccgcgagatacccggggcgtcggcggacattagccgctaggaccttaggcgagaaaatgtggacgcatccccgccggccctgaggccagagaatcccccctcaactggttgcacctcatgtccctcccgcacacgttgactctccctcctaatccccaggaccccgagggctctcccacatctcccgcagcaagagccaccgatcccccttaagaagcgttgactgtacggcggcgccagagggccaaactaagttcggtttcgggaaacgctctcgggagcagttctgtaaatccctgctgggagcagagactgcgaaaagctgagtccgccgatcgtgcccgggacaaggctgccttccactcgccctcgccgcatctacctggtaggcggcatgcgcacgggcttagaggcttgagagcctctggaagagaaagggtcccaggaaggaaacctgcccccggcctaagtgtcggcgcccagatcaccacgaaccccgcacctaggcgccgcccaccaagttccaaagaagtccgaggcgacctgggagtcggtcggatcccagccgagaaaagaaacaagcaggatagcaattcttaggggagccaccctgggagttttaggcagcgtttgcctttccctggttttcttcaccaagccccatcctccccccgcataccacccccagtcaaaagagtgggagaaaatgcacagttcgaagtcggtgagagcaaaaatgggtctagtaaatcaacccgtggtggtagctaaaaggtttggggctgcaaagaaacaaactgtaagttttgagcaacaaactttttcttcaatctgtaatatgtcgaaatgggaagggggtgttgcaaaagccaactaccactgtcaaacttagcccgtttacaacatggggaaaggcgtatttcttactaatatctcaacaacgataacaatgctgtatccttccttaccttgatgttgaactgcgaatcctcctccggatcaatgtccaggaacttagaagaattggtgatattaggagttcagtacttctggaaaaaaatgcaaatggtttagccaggatctttcctgtctgattcgtcactattattatatctgatgatgcgaatggttggagcgattcaatcctaagtcattaatgagctattttataaacaccactgtctgaagatcttcatttacattttgctaaggatcacttcgctaacctcacaggcttgtgtcaacagcatgatttgcaggacttcagttacactcttataaacaacacggctgtattgttaatcggttaatattttataaagtgtaaatattttattatgttttgaagggaactattgattctaaattattaaacccctgagaaggactatttaaatgaaatatacaattaagtacaattaaatgtacattgtggttagtttgttttcagattctgcacccttttaaattcattgcttttctctttactggagtttcctcttgtccatttctgatactgaaaaaaatctatcatgttaggaaaaagcctaaattatttaaagttgcattaaacttagaggaaaatgtcaaatacgattaattatgaccagaaatgtattttggatgtttgtagagttgtatttcatatcacattttacaaatttcttccgatttaaaggagagttctaggaagttttgtgatctatgtccggtgtgggtttttgtcctctcgagttttgtctctaataaaggccttttttgtttcaaatta

SEQ ID NO: 285 - DNA, 202882 bp, Homo sapiens
tgaatgagaggtgccccatcaactggacttctcctgagtgttgaaaaggtaagagggttttgcttctttattcactcctttcttactatttgcattgtaatataactctcttgggactcaagggaacaaaccatacagtgtcttttgctaaatgccaaaaatcaagaagccagttgaagttttcagttcaaattatttcacaagtgttacacagtagaaaacctttatggtggctcacgcctgtaatcccaacactttgggaggccgaggtgggtggatcatgaggtcaggagtttaagaccagcctggccaagatggtgaaaccccgtctctacaaaaaatacaaaaattagccaggcgtggtggcgggcacctgtaatctcaactactggggaggctgaagtagggaattgcttgaacctaggaggcagagattgcagcgacctgagatcgcgccactgcactctagcctgggcgacagaccgagactccatctccaaaaaaaaaaaaaaagaaaagaaaagaaaagaaaaagaaaaaaaaaagaaaaacaacaacaaaaaaaaaccaaaacaaaaaacctttttttttttttgtctcagtttgaggtctcttgttacaaatttaaagaaaattaattttacaatttcctattctcaatgattttgatttactgatattttaccctacaacaatatagtgaaaaagtgtggtcatgggattggttagacctaattcaggactaccaatactagatgtgaggctataggcaggtgtgttaaagattctttggaatcttattttactcaagagtaaaaagtatgtgtagtaataattatttcataagtatattgagagcattaaatggggaataacaaccatataaaaggcttagcatattagagacttaatacaaatcaatttcttgcattttgcttatcctggatatatcgtgggtttgcttcatattggaaaacaagacagcaacaaagatccatgtttcattcttcagtgacttaaaatattagttgttctggccaggtgtagtggctcacacctgtaatcccagcacttcaggatgctgaggtaggatgattgctggagcccaggagtttgggaccagactgggcaacaaagtgaggccctgtatctacaaaaaataaaaatcgtagccaggcatggtggtgtgcacctgtgatcccagatacacgagaggctgaagcaggaagattgcttgaccttagaaggttgaagctatagtgagccttgtttatgccactgcattccatgtattagttgttctacaaataaaaatattttactttcaaaacatgttttactaaaagtttttcagtaaggatgtaaaaactattaatggtcaactttgactacttccaaaatgctttttttgagtgaaatgttacacctctttgttagttcattgcaataatacttaaatatttaaaattgaaagtcagtaatggtaaatatagaagaattagaggataaaatgagtggagatatggaaaggtacagattgaatataattatttaagtaaaatcctttcctagagaaaatagaaaatagaactttgaggttgaatctcttttaatgtaatgtttttctcgaatccaagtgtttttacactatacaataggagtagaaatttgtcaccactctgtggccaaactcactttttctttctttttttatttttacattaaaaaaaaattttactttaagttccaggatacatgtgcaggatgtgcaggtttgttacataggtaaatgttttattttaaatttaatttaacactttttatttttaagtcatacaactctcatagccagtagttaatattaccttgcaagtttggtatggttgatgaattgcatcctgttaataattgctacagatttttgaataattgcagaccagtttgatggtcctgggttggcataagtacatgaagatttactttttcctgtgagctttcttgggatgaagaaatttagtgtttttttttaatttttaagaaatatttattattttttacatgatttatttcccactgaaaaataaatcccaccgggcataaagtgtatttttttaagtcacagagtaacccaacttgaagctagtttttcagacttaggcagttcatgctgtaagcccgagatctcatggtcacccttgcaagagaaatatctaattgaaaaaaaatatgaagagtattaattttgatagtgctaaaatgacataaagggatctcactgggcttgagatattaagtattaaaattgttaaaggtttaaattgttagtaacttgttattgcatagaaaatgtgccaaatgtcagtaaataaaaaaactttttttaaaataaaaatttacagaaaaattatgacgatactacaaagaggttctgtacaaccccctcccagtttctcttactattaacatcttaaattagtatgttacatttgtcacaattagtgaaccaatattgatacattagtactaactaaagtcagtgttccttttactggagaatggtgttagaaactaaggtctgggcactgtggtatggtggttgctattgagatgttgttatttttaggttctttctcagctgacagagcaaagaaatatatgtgtgtatattaacctatgtgtacacatacatctatgattatttcgatatgtaacatctgtatctttattaagctaaatatgagttcatatggtgtcttcaattctaatcaattactgtatagattattctagcctcttcctcttgcttatctgtaacttcctatttcaaaccgtgaaaaatctgtcttccaccacctactatctgcttacctaatttctcatttccagtttatgtatacagtggcttcagaattattacatatagccctgtgggatacaactttgtcaactagagtggtgcttatgtaagttcttctatctttagttttactgactctactcattttcaaagttgcttagtccagaacatttcactcatactcctcctagtgaagttgtttcatatgttagtaacacagattctttttttgcagtctgcattccattttagggttccctcctctccaatctcctaaattattattttttaaattcatatacatcaaggtttattctttgtgctgtaaagttctataggttttgacaaatacaaagtgtcatgtacccatcattacaatgtcatacagaatcgtttcactgccctaaaaatatcccttgtcctttgcctattcaacccttcccctcctttcccaaactcctggcaaccactgatctgtttatcgtggagctgtgtctcttccagaatgcatataattgaaatcatacaatatgtagacttttcaccctggcttattttgttagcaatatgcatttaacattcatccatgtccttatgtggcttgtagttcattactttttactgctgggtagtattctatcatagaaatgtaccacagtttgtttatccattcgctgattgaagtatatcaatataccttggaacatgactgctagatagtatagtaagactatatttagctttgcaagaaactgccaaactgtattttaaagtggctgtaccattgtgccaccagcaactcctgccagtgatccagtattgtcagttttttggattttagccattctaaaaggtgagtgatggtatctcattgtcgttttaatttgtaatactctaatgacaaatgatggtggatttcttttcatatgtttgtttcccatttgtatatcttctttagtatgtgtctgttcggatgttttgcttactttttttaaactgggttgattgttttctttttctttttctttttttcttttgagacggagtctcgctctttagccaggctggagtgcagtggcgccatctcggctcactgcaagctctgccttccgggttcaagtgattttcgtacctcagcctcccgagtagctgggactacaggcgcccgccaccacacctggctaatttttttgtatttttggtggagacgaggtttcaccatgtcggtcaggctggtcttaaactcctgaccatagatgatctgcctgtcttggcctcccaaagctaggattacaggctaggattgcaagtaggataggcgtgagccactatgcccggctgattgttttcttattgttgagttttatattcctttattttggaatggagtaaataagcacaataaaactggttgagaagataatcattttaaaaaatcataatgaattatatgatacacattctattatttcatgagaaaaatcatggaagagtcagttcaatattcagtgaatcattaatgtgaggatgtaaaatttgatacacacacaatttattgagcacttatcctatgtcaatcagtgcgctaaatttttttcttttatattaactcatttaattcccactacagccctgtgtaatggaagctgttcttcccaccattttataaatgatgaaaccttagatcacactcagtggaagagttctaaagccctatgtggtgctgtctgatagaaaatatattttaaaatgagatgatctaaggtatgtttacctacagagctaaaggaaagtatgtcttaaatttaataatgagtgattatagaaacagattacaggaaatagtccatctttcttgaattatccaaagtgttacaagcctcaaattcattgttgtttgtatgagaacacatttaggtgatcggatacaagtatatagtttttcccagatgtttatttcacatcaacttttttttcatctttactttcttcaaggcaagtaggatagaatgtaataatcaaataggtttttcccccaccccattttagagcagtaaataattccaagaggcatttgctttgttattggataagtaattaacaaaaagaattcctaaagacaattagaatcatgaccatactgggtcttgaaaacatagcagtgcaatcacagccaatggctggcttggtggctggcgatgagcctgcagcatgggactgggtgttccaccacggcttggctgttgtccagggagctttcagtcgctggggttcccacagtgccaagcacgaggcaggtgcagaaaggataaaggtttctgttccccattagtgttgagggcatgcaggtcgtctgacatgaggggcatgagaagtgaagttcctgctttgctttgggtaaggaatctgcattgacaggggcttaagaacctgctcttatacctcacatgtcttagcctggcctttgagatgagtagggagtttgagtgggagtttgagtttcctcttagagaaacagaactgagtgaggcactttcattttttagtttcctagtaccttttgttaaggaaaaaaaagccaaaatgagtgttaaaaatttaaaatttttagattttaaatttgcatttaaaaaattaatgcttttttttttagatggagttttgctcctgttgcccaggctggagtgcaatggcgtgatcttggctcactgcaacctctgcctcccaggttcaagcgattctcctgcctcagcctcctgagtagctgggattacaggcgcccgccaccacacccagctaatttttgtatttttagtagagacgaggtttcaccatgttggccaggctggtttcgaactcctgacctcaggtgatccacctgcctcggcctcccaaagtgctgggattacaggcgtgagccactgcgcccagccaaaattaatgctcttaacatgtaaaaagtaaagtgcagtggaactttggcacttatgcaagataatacaacttaaaagatttataagaatattaactgctaatgaacagtagagggatctaattaacattgaaagttacatgaagaaagtgtttgtcttctattcccaacagggcatctttgtaactataatgactcttgagaagattttgttttcagtcttaaaacaggaatgggggaaaaatgtaggcctgggtaagtacaaaaaagggaaatcgaaggagactagggagttactgtagattttgcaggactgaggaaagtcagaataaatacaagagacaatgatgctggtaattttctttgggctcagagaagtaatgctttgctttgtcagagttgtagtaaaatttagatctaagaagctcgttggaagttgtagcagaatcctgtcttgtttactatgtccactgcctggcacagagatggaacactataagctttccaaaaacatttgtggaatggaatcagaaagtcactttactttccaagatgcaattctttattttgaaacataaatatttaaaaagtttataaatttttgacataattatgacatacatccttccaggcttttttcaatgcttatgcaaacatgtatatgtgacctgtaggtctccttttacccagtttttggagtacaaataaggtcacatctcttcttaactttaaatgtttaaaacattgaagttagcaagaagcccagaaactttttctaaagaactttttctacccctaattgtccaagaactccaagttttcttggttcaaagaggtaatttctgtttctaaacactagaaaaaggagaatatgaaggatctgactagtccattgtcacatgccccaccccattttctgctgcaagagcctctgtcaccacagcattgtgtcactgatgaaaataggtcctcccacagagtcagatgcatcccagtctattgctactattatcaccctgttggaacagatccctgcacaggtcacagcagttcctggaagatgaaactcattctcccagccttaatatcagccaggaatactttattcttggacttccaaagttgctatagtagtttccaaagcccacctagcacctaaggatgggtgagtaaagacaagcttccagtttcagctgcagaaacaagaacccatctcccaccacatagtaggtgttggcattaaacttctctcttatgatgtaatgtgttctccttgggatctttggtatttctgtttgcatacttcatttggggtcatctcaacacaccaaacagattctaactacactgaatctcaaaagaaatagaagtagtctttgtcaagccacagaaaagagcttgttcttctttcttctcctcctagacacctgcatacttttcattcctctaatgaagagggtccattcaataaattcagaagaaatgaagaaaaaaatacaagtctagtttgtgataagtccttgttttcacctaaacagagaagcaagaacataaattatataaggcaccttctcttaattaaataaacaaaagagttctatgtggtctagttacacagagatcacagtgattaactactcagctctggagccagacaactgggtttgttcagattctggcactctttcttgaatttgggcatggcatttgaccttctgtacctcagtttcttcatttgtaaattgggatgttaataataaaatgtactaactttatagggtctttcctgaggcacataatgtaatttaaacaacaaacaagtatacataacagacatttttttcttacaaagacggtaccatactaaacttaatttgctttttttgaaaaattatatttttaggtaaaactttgtaagttaatttttttgggtgaaaaacatgatacaaatttatcaatttgattttgcttcattagcatgatatactttgttctagaaagtacttaggcaattttcatacatgtctttaaatataatttttgcacatgtaaataagagttccaaagtattttgccatcacttcatcagtgttgcctctcaacagcctttgaagcgaggagatgccagtcactgtctcagacacaaggatgcaggctgtggaggccagtgagccatagtcactgaactgggaattggctgtccttttgaccatacagattaatcactgtagtttcaccaatcacattgaacttgaagatcaataaatgaccctaaaacaatgagatttcatagactctttctatatagtggaagttaaagcaaatcagaaaggagtccctaaacctgtgaattcttgaattttagttttccaggtcaacaagccttctttaagtgacttcatgtcccgtccttggtttttgatcatagactggtataagaaatgaccataaaataaatgtttttgagaaaattatagctgaaaatactgtccatgataccactcagtgatataagtctctaaacagcaaactcttccatgaatggggtggagggaagatggtttttctttccaggtgaacttacatattgccttttctcagatatcagattatgagaataatacaatggactgggctttgacagccaagactttcagaattgctgttagtgcccatgtgcaataaaatttttctatcatgtctctcttattatttcaaatgccctgttttactgttttgattactaattatctatttagagggaaacagttataaataaataattcactgttctacttactgtgcacccctgcctttctaaatataactcttctatgtagcatgtaaattaccacagaactcatctcagaaaaaagatcactacttttctttttagaattcaaatttataatatctaattctataggtggcatctggcctttagcatgatatcaccaatgaaaatttaatctgtgttatgaattcccttgtttctagaaaagcttcagcaggaaaatgagaagagaacccataaaaaccataaaacatttcatgaatggtagctttagaaaatcttacaggatttggtagcttttacatttatgacaaagtgatatttttgatgttgttcataattatttcagttcattagcagcattaataagctcccgttttgtacagcttgaagatctttaagacttccttaatgagaaactacctttaagctacggaagacccatcagggtgccaaattccatctggacacagttacaaatacaccactgttgatgagctgaaaattagagcaaccaaacaacagagctttaaaatgttatttcaatgcaaagggacattttcaccatagaaaaatagaagtttgcctctaaataaaaatgattttacaattgcaagagtacttgatttacccctttacatttagttcaaataccaaaaatttcttaaggaatgagaaattccaatgttcctgagaattctgatagcttttagagagttcagttttctgtagcattccattttgcaatcctatacaaatttctaatttataaccagtggtatgtaatgataatttctaatatttattaagtgtttattgggttctaagtgctttacgtctgatatatgtatcacatttaatttatttcatccagtggttcttaactggggacaactttgtacctctctccccaacatatttggcaatctctggagatagtcctggatctccagatctatctgtcacaacctaggatgtatgtggtcctacgagcatccagtgaatagaagctagagatactgctgaacattccacagtacaagggcaacccccacatcaaagaattatccacacccaaatgtcagtagtactgaggtagagagaccctaacttaatctgttcaacaatcctatgaggtgattttttttttttttttgagataaggtcttactctgtcacctaaactggagtgcagtggcatgatcacagctcactgcagcctcgatctcccaggctcaagccatccacctgcctcagcctcccaagtagctgagatcagaagcatgcaccaccacacctggctattttttttatttttttgtagagacaaggtcttactgtgttgcccaggctgatctcaaactcctgagctcaagcaatcctcctgcctcagcttctcaaagttctgggattacaggcatgagccatggcacctgaccaaggtgagtgtatttaacctcattttcaggcaaggaaacaaaagacagaaaagttaagtagcttacttaaggtcacagagctaagtgtggtgccaggattgaaaacctagttctttattgctttagcacaagctatttccactatactctgtcatgttcagagaatgttgatgtccatcagtggattctaaattttgaaggatggagatactgccttattctgtacatctgctttagcacccaagctcttgcttggtgaaaaattaatagtaaacattcatcttttgagcatcttcaaatatcccctttagaatgacattcaattattaggtcagtaaccccaagagaaaacggttgtttgagtgtatatactgtattacaaaataaggggtgaattcaaaggaaaacataagatgcaattcgtgcctccaaggaggttgtagggaagaggggttatgaatgtatgtaaatagaagttggtgtgcgtgtgtgtttataaacagaattgtcagaccaaacattattttggaagcagtaaaagtaaactagaatctggcctagtcatgtcccaggacacctctttcaagtcctgaaacatctttgtaagactgtaatgtgtgtttacatcctaggtaatcactgtggcccactgttgaagagctgtggctgttcttacccttctagcttagataaacttataagcacaaccagactacatatatgaagctgaagagaccttgtctttttttaacgagcttttcttcccgataggagtgactatttcttttcttcttccacattttcaggttttagtgtacttgtgattgctacccacttatcactattaaagtctactcaggagagaatctgagaaacactctcaaattaagttgaacatgatggataagtaaagtattgtgaaagttcactctcatgatttctaatggtgaaacctggcagggtgactaatctttgacgagaaggttatcacttataatctttcatatattgagatcatttgtaagaagcacccagcacattgctgaacacaaagtaggtattaaataaatgttggcttccttttctcctactcatcctcgctcttctttttaatatacctttaaaatgatgccacagaaatggccacccaatcttctatatttaaggtcagttcttgcattaggaaattctataggggaagtatgtgaagtatgtgtagtcagtcattaaatgcttgggctctggccacagattgtttaggtttaaatcccagtttcctcttttattattaattgtgcaacttgcttgggaaaacatgaaacttgtttttcctcaggttcattatctgtaatatatagtgaatgaagaagtttcctgtcccatgaaggtgttgtaaagattaaaaaaggcaaattaggctgtgtatttgtcataataattggcatatatggtaagtgaccaacaaccataaggtattataaaattgttataaaatgatatgagctatcattgagcagcatgaaagaagagcttcactgtttcacctactatcaccctggcccattaatctctttcctgttcctgacatttcagagatacgtttaggatttcaatcatgaccttaagccacatttgaacaattttctggtggataagtcctcattcccacattatgtatgtacctagatgcaaatcctgaatatcatgtcgcaattagtgcatctggacatgcttgctaactgtgttaaagctctgaataatggtaaagttttatttctaccaaaacaaatttgggctgtaatgttttatgataaaaatctgtggtcttcctatgtacatgtgtgtgtacatgcttaaaatgcaatgttatagttaaatgtaattcattaaaagtatgtaactccagtggctacttagtttggctacttggtttgtagatttctgctttcctgtttcattgttaaacaggtctagaagttattatttcatgaaactaatgtgaggaaaaagactatgttgatatataagtgacattatataaatacatgagggatgatttgattagaagcagtattacacagtgataggagtaatggtttagaactagactcaggtttgaatcttagctctatcattataggcatttacttaacttttcttgtttgcttaactgaaaactgaagataataacacctatttacatggttgttataagggttatatgaataatgtctggcaaatagtaagaactcaagtaactgtttcactctttccagaaggagattggctgaaaaatatttggagtctcctccagccatattccttggtcagcttctatgatcctctttggagcttaattcttaatccctttattttcacttgcttgttgataacaaagaagaactaattattaatttatttcaaaatgcatgtattatatttgatgggccacactaacagttataaaccaaacaacagattgggaatggggaagtggatgtggtgagttcaatcacatgtctgggaaaagtcaatagtgaagacagagtctcacaattttttgtcataatggagagatgaaaacacaggtagaggatttcaaacaacagagtggatggtgagttaaaaatgctgaaattctttcctggtgtctaacttaatgcaatgtggtttatctctttgctcttttctctactattcaaatttaggataataaagattaaatgtttctaaatcttactttacaatatcaagaaaaaaaggtatgcttttgcccacggaagggcaaagcagagctatgaaaacctgctgaacacattctttattttcaacacaggttcttgtctttccatcatgaaatgcacattttatttgtactgtatttgggtgaccacaagtcaacaacaagataattcacaagacccttgccttagatgtgtcggcaataaagtaatcaggccaaaatttttactttcctttgaatttttcaattcaaacacaatgtatgcttgcttttacacagtagggttcagggattagagggttggctctttaaaaaccgtcagagacacaggcaatcctacacaaaattctcagaaggaaggcgcctacgcctgggaatgcccagatgcccctcagagagttgaagatggcgtttctctgagtcaggtcaaagttaacacattaccttcgcttcaaagactgcttggcttcctttcggtggattagtcaagatgttttgctgactgagactaggaaatctataggagggcgggttagtttacattgttccttgtcattatcgctaaaacactccaaagccttccttaaaaatgcgcactgggctaaaaaggatagacaaggaacacatcctgggccggtaattacgcaaagcattatctcctcttacctccttgcagatttttttttctctttcagtacgtgtcctaagatttctgtgccacccttggagttcactcacctaaacctgaaactaataaagcttggttcttttctccgacacgcaaaggaagcgctaaggtaaatgcatcagacccacactgccgcggaacttttcggctctctaaggctgtattttgatatacgaaaggcacattttccttcccttttcaaaatgcaccttgcaaacgtaacaggaacccgactaggatcatcgggaaaaggaggaggaggaggaaggcaggctccggggaagctggtggcagcgggtcctgggtctggcggaccctgacgcgaaggagggtctaggaagctctccggggagccggttctcccgccggtggcttcttctgtcctccagcgttgccaactggacctaaagagaggccgcgactgtcgcccacctgcgggatgggcctggtgctgggcggtaaggacacggacctggaaggagcgcgcgcgagggagggaggctgggagtcagaatcgggaaagggaggtgcggggcggcgagggagcgaaggaggagaggaggaaggagcgggaggggtgctggcgggggtgcgtagtgggtggagaaagccgctagagcaaatttggggccggaccaggcagcactcggcttttaacctgggcagtgaaggcgggggaaagagcaaaaggaaggggtggtgtgcggagtaggggtgggtggggggaattggaagcaaatgacatcacagcaggtcagagaaaaagggttgagcggcaggcacccagagtagtaggtctttggcattaggagcttgagcccagacggccctagcagggaccccagcgcccgagagaccatgcagaggtcgcctctggaaaaggccagcgttgtctccaaactttttttcaggtgagaaggtggccaaccgagcttcggaaagacacgtgcccacgaaagaggagggcgtgtgtatgggttgggtttggggtaaaggaataagcagtttttaaaaagatgcgctatcattcattgttttgaaagaaaatgtgggtattgtagaataaaacagaaagcattaagaagagatggaagaatgaactgaagctgattgaatagagagccacatctacttgcaactgaaaagttagaatctcaagactcaagtacgctactatgcacttgttttatttcatttttctaagaaactaaaaatacttgttaataagtacctaagtatggtttattggttttcccccttcatgccttggacacttgattgtcttcttggcacatacaggtgccatgcctgcatatagtaagtgctcagaaaacatttcttgactgaattcagccaacaaaaattttggggtaggtagaaaatatatgcttaaagtatttattgttatgagactggatatatctagtatttgtcacaggtaaatgattcttcaaaaattgaaagcaaatttgttgaaatatttattttgaaaaaagttacttcacaagctataaattttaaaagccataggaatagataccgaagttatatccaactgacatttaataaattgtattcatagcctaatgtgatgagccacagaagcttgcaaactttaatgagattttttaaaatagcatctaagttcggaatcttaggcaaagtgttgttagatgtagcacttcatatttgaagtgttctttggatattgcatctactttgttcctgttattatactggtgtgaatgaatgaataggtactgctctctcttgggacattacttgacacataattacccaatgaataagcatactgaggtatcaaaaaagtcaaatatgttataaatagctcatatatgtgtgtaggggggaaggaatttagctttcacatctctcttatgtttagttctctgcatgtgcagttaatcctggaactccggtgctaaggagagactgttggcccttgaaggagagctcctccctgtggatgagagagaaggactttactctttggaattatctttttgtgttgatgttatccaccttttgttactccacctataaaatcggcttatctattgatctgttttcctagtccttataaagtcaaaatgttaattggcataaattatagactttttttagcagagaactttgaggaacctaaatgccaaccagtctaaaaatgcagttttcagaagaatgaatatttcatggatagttctaaatactaatgaactttaaaatagcttactattgatctgtcaaagtgggtttttatataattttctttttacaaatcacctgacacatttaatataggttaaaaaatgctatcaggctggtttgcaaagaaaatgtattacaaaggctgctaagtgtgttaagagcatactcatttctgttctccaaaatatttcataaggtgctttaagaataggtatgtttttaaaagttaagttcctactatttataggaactgacaatcacctaaaataccaatgattacaaacttccttctggccttctggactgcaattctaaaagtgtaaaaaacatattttctgcattaagttaggcagtattgcttagttttcaaagtggtaggctttggagtcagattattttgattcagatcctacatctactgtttagtagctctgttgcctgaggcaggtcccttaacatctctgtgtgtgacttgacctttaaaatttggagactgtcataggggttaatcccttgagaaaatgaatgtgaaaagttagcctaatgttaactgctattattatggattaccatattttcacattcatcacagtacatgcaccttgttaatataagatgctcaattcatctttgagtataattttgtgactctcaatctggatatgcaatgagtgggcctgtatgagaatttaatttatgaaaaattgtgtttcacatggccttaccagatatacaggaaacacgtcacatgtttctattgtatgttgttaaatgccttagaatttaactttctgaataggatcccttcagtttgagagtcataaaagagtaaaattattatggtatgagttatagattgtattgaatatctctttatatgtctaggttttgtcattggaaaaccaaaaagtttggaaaaaaaatctaagttatttcttactttcttaattttgtgtggatttcacatcaagtataaaatttgaagaacatctgaactatcataatccatatatatatataaaataaacataatctaagagagaatttcaccatgaaaaattcaggtagttcatgactatcagagcaaacaagtacattaaattgaaacttttatgaaaataacatttatgaaataggaagctatttttaaactagaagtgatatattagcatataatttataattcatatacaagtgggattgatttataaatggtcaccaacagagattgtgctatttaatttgggaaaattttttaaatttacattttctcacaacttttaaggtagttattcagtttgttcctctctgtctcttctctcatgccctgaatttttcatatttcgtttagttgtaagagtgtatatcaaaccgtgtgtcacatgacataacttgaattttcgtcgtgatatctgtgctatgtctaggtctatactgaggaactgtgggaaccccacagaatccaagtatacagtgccactgatttcttacaagggatgtggggtctcctgtaaactctgcagttagtctcaagtaagaccaaagagtaaaatattgttaggatctaaggtggaaattcagcaaagaatcacatagtctaagtctcgagtttaacagtaagataatttgagatacttttgtaattattaaacacaaagtaatgagagattttaaaacaaacaaatacacctgaatttatatatcagaataggtatggtggttcaaaatagctatctaataaaaaccacactcctattctaaacatttgcctttgatcaaaataattttgggtctcttattatgaaattgcctttctaaataatacataaatttcttctcataagtatatattagccacattattttattgttattgttttatattcatagcttgctttagattaaaaattatattacccagactggtctcttggacttgcttccaagtgacttttgactgtatcacaaaatcaaattcactctgaaaatataaagatttttcatcataatttcctttgttaacagccaagtgctacctaattttaggtgttttcattaaaaaaaaatgcattgcaaactttaaagacaattcttttgtttgtttgtttttaaaagacagagtctcactctgttgcccaggctagagtgcagtgacacaatcataactcactgcaacctccacctcctgggctcaagtgagccttccatcttgcctcacgagtagctgggtcttcaggtgtacaggtgtgtaccaccatgcctggctaactttttttttttttaagttatatagagacagtatctcactatgttgcccaggctgctcttggagctcctggcctcaagttatcctcccactcagtctcccaaagtgctgggattacaggcgtaagccacctcaccctgtcagcctaaagacagtgcttaatgaagagaaatataagtgctttgagcaatggaagtataattaaaattatactatgaaagatttataaagatgaccattttgaatgggaccacacttatttggttatataaattatgatacactattaaaaattcatcatgatgattttgtatttacattttatttacatgtttgcaatttgtgaggaaagctaaaattatggctaagccataaatatttttgcagtttgttgagggtgtttgtaaaagtgttgccaaggaagaccagttggctacccaaacaagggtttagtctaggtctgatcaatacatacacattatctcaggtttgtctatcagaaaaaccttaggttatccaaatcaaaataaaatagatgcataaaacaaaggccaatatgtgttgaacaattatattgtgatatacaactgccaagcattcccgattaccatgactccatttagtcagtccatgggcaaatgccatcaatgaggacagcccagggtttccatattctctcttggctttacatcctataggaattggaggggcccacctctgggataggagcccttctgtcttgaacaatgttgtctgaacactaacaaatgttgactttctacaccagtccctcaatagtcttttctatttatccttttgctgaccatgttttgttattacacagttgagatttttcagctgggaatctgtgttaattttgtattaattttgattagcttaactctcagagttctaaaagtacctcctgtacctgatatatgacaaaaattataattacatttatttatatataaaatatctttgtatatgtaaaatatctttgtatatataattatataattgtttcttttaattttgcaaattttaaaaagttctcctttgttttgaagtttattcctatagttttttatatgctagttaaattattaatcacttgattcaagtaatattcttatatacttataaggaatagtgtagttttaatatttaattccttgctaaagagagaagtggaatctatttttcttagctacttcatcaatattttatgtttgatgtgacagtcaaaatatccctcagagctaactgttacactagggaaatcacggttttccagttttccatttatgtgttatgggagggagtggaacttagtgtaataatattcaatacataaatgttaacacttgtttaaaggtccttgagtgagtactgctataaaatgcattattattgctagtgtcatttcacaagagcctataatttcagtgtgatagagctacaatataagtatagtattgcaaaaccatcaggaagggtgttaactatttagcatgcagttatgtgttggttgtcaaaacgttaaaaacatctctgactcagcagcaattttggcaattttgatcctgaggcatctgtgtagggcatcttcctggagaaaaacctctgagatgcaatgaggtcaaaaggggaaaacagactatgataaagatcaagttgtttggagatcttgtagaaagattaatttacaaatatgtcaagtgcattatcatggaggaaaacattgctatttctgttggttctcttcagagctctagaatcaatttaccacatagttgtttcagtgtgaaattagcattacagagtggctttacggctttactgtagggcattgtgtcagcaaagagcttaggcttcttttagcaagaagcttgtaaaaatttaatttactcttagattgcttgatgtagagaattacattcctacagagctctgaaaaatcttttttcagagtttttcacagctgtattcaagttgcaaggcttgtcaactttgctatttttctgtgcagctctgttaacttattattatcttttgacataaattatgattccaaattgtaaagctctggatgtcagggccttttctaatttgtttagtatgatattcagaccatttcaagactcttccgtggaacaatttaataaagatttttttgtgatgttaatgagttcatggtgatcaaccctagagacctgtgtctattgtagatcgatgacattcaacagtcctgcagtgctggcatcattttgataaaaaggggtcaaagcaagtgggactgtgggcagatttttaatgcttagaacaattattccatcgaagttttcttgtgtcccttctgccttagcctttgtaggatagcatgcttgctaatttcttgctcatggggtaaggaaatgaagatttttgctaggtccgtaggattattaggactactcaggcctgaagctatgcctggatatagccagaaaactctcccatagcttgctccaaggagctgagatacagcagtacttcctttgtaggtcatgattctgggtaacctggaagatgacctcattcatattctgtattctatgtgagacgttaagaaggtagaggtggccaagaaggaaattgttgctgcctttatggaacaaattatctgaaacccagctttctcgagggcttcattgaagtactcaactggggcacttaacccagtctaaggctggtcaaggaaggcttgctgggggaagtgtcttttgtattcacacctaaaggaggttattcaattagaattatccaaagagggtagggatgggctaggaaaaatttaaacaggtagtgtggaggactgacaggataagtaagcatggcaccttcaaaatatcctgagaagttccctatgacgggaacataaaatatgtgacagagatttgtgggagatgggtctggaaactctagcaggggccagatcgtaagggggctttgtaggctttgtaggctttgtttgggctttatcatactggaagtgaaaagccatggcttttaaacaggagagggacataatcagttcatatactgttgcagttttgtaaaagaaaagatgagctgaaagagtggccatggtggaggtgggtggggtgggggggagggggcggggagagagagagagagagagagatttgaaagacatttaggaggtaaaatcaactggtttggtaatcaattagtagttgaaggtgaaggaaagagaagagttaaggataacatctatatttgttgatttggataatagaggggacagtggtgctgcttattgaatgagaaaatttaatcggagaagaaggcatggagcaggagtgcagacctatgtgactctacttctctcaaaaccagaaacggaaatgatgtatatggctcagggttaggtaatatggttatttgaaaatgtattaaagtgatttagagcttagtcttaggtaagagatataagatgtctgaggtgacagttttataaatatgtagagtgcccacttgtttggccttattgtggcatagtgtgacctgagagtgttaggaagaagcagctgagttctagggacagtactggttaaattctacttagaaattatacttagaactctcctatataacctgctaactgatgtctgaacctcctgataacttcactcctttaggcagtgcttttcacatcacgggacacaacatatgagagatcatagaaattcaatgtggtatgaaaatctgcttgggacttcagatattgtctccagtgattgaataaaaataggagctcacctactatgatgaggtttctgtgtgtgttaaaagaaggttttcattacttttgaaaaggttatgtatccttgttttatgttaaaactttgagctttgttaaatatgcagagttctctttcttagcatggactacagaggtgcaactacctcctacctgacttcacatctactcccaaatgcctagtgaaggcttaataatttcaaaaagggactctagaatttcatttgataccagtcagacaaatgtgtgaaaattaagcataataggcagaatcccaggggtactgacagctgtattaagaggtgattcaagggctaaaccttagagtccagcattggttatgggtgtgacaagaaaatgaagcctatgttggctgggattagcaaccacagttctagaggaagcaaggtggagaaactatatagggggctccctttgtacgttttatttattttaaacatctctataaactctagaaattaaaacaacaataccaacacaaaagcatcactttttcgaccaaagaccattgctatacttttttgtgtaaagggctagatagtaaatattttcagctttgtgggccacataagtctctgcaatagacaatatgcaaacaaataagcatggctgtgtttcaattaaactttattatgaacattaaaatttgaatttcatataacttttacatgttgcaaaatattctttatttaaattctattgcaatatgctttaaaagatacagtttttagtctttcttagtttaaaataaaatctagaaaaaattttaagtcttctataactttttttcggtaactgaataattttaaaagtaagtgaaacatttagacatgcaaaatggacttttcagaagaagaaaatggtagcttaacagttattagattattgtccagaataatttttgacttataagtctctgttgaccatttcattgcctctttttttggaatatgcatcttttaatgtgtccttcaaggcaaaggctctatcttatctatcttgtgtcttgcattttcccagggcaatgtttttcacaatttttttaaaaaacaatactgtaatcaattttcaaataaaattttccatgggaccgcagtgtatacaaatagcagtgacaataaaagataataactctcccataaatacaaagaaacagttaacctagtgctctaaagtaaaggctacagtgattttgtataacatttatatgtaattttcttgatcctacatggttgtgtttttcacagtgttatgtttctgaaatcgagatgccttttataattgatgtcaaaagaaacttgtcagccacaaggcccaggaataagttgtaatatgggaacttagcaatacataaaggtatatatactcctgtgacctcagctgaattatttgcattggttgcatcccacaaggttgactcttaaataaatttagtttgttgcttgaaatttcttgggataaattactttgtgatgtagttttgaaaaaaaaacaggtaatatttagtctgaagtttgtctgacatactaagcaatgtaattaaagtagaagtcgcctaagctcagcactttattatgccttgaaattatactgcctgtcctacaggtgaaggtgttatgaatgcagtttgtcactgtaactctattcatagctctgaaaggctgagagtgactcagaagaatatttttgctctgaatatgaagaacgcttagactaaaactttaattacgatgctgaagaagaaagtggtaggtgattgcatgaataagtatgtaatattgttaatttctaaaaactgtgtatagttaatgtagtgcttctttttggaaaggctattgttaaattgatggtaaattctataaccaatatcaccttaaagcaagtacgcatgataaagtattataaaaccatgataatatcatatgtggcttattattgttccctgagtgttgtacaactctgttatgctgtgatgaaacctcatgcaaacaggtatgtcaaagatatgatgggctgttaactgagcttggcccacatatggtgtagtgacatgctcactaatgcagtgcagagataaccaataacagatcataacaggtttaaatatgtgcaaggagatgtcagcagaagctttcctacatagtgaatactaaacaagcctgacagcccaggatcatgttcggatcaatctagtgtgctaaaattaacatatagtcctacatttgagaatgtgtgattttcttggttcctgtctataaaataatattttaaaatacatacatttcaaatcagaagttggtgaattcactgaaatatttctagagaacactaggtattggggctcatagtgtgaaaaccactgacttaattcttcccccatcttggttgttcctgatcttcccttgtgtccccattccagccatttgtatccttagaaaatgatctcatattctacttcatctttatcttcattgtcaactgtcaggtagcaatatatgatggaagaagcatgtactttggaatcagacagacctggctggaatcctaactctgtcacttattaacaatgtgatcttaggcaatttacttaatctctctgaacctcagctactctcgtcagtacaatgagttatccttatctttacatggcacagtattattatgatatcaaaaattcattgagtatttactctgcatattagtcaaggttctccagagaagtagaaccaatgatacacacacacacacacacacacacacacacacacacacacacaatttattataaggaattgacttacatgattatgatggctaacaagtccaaaatctgcagtatgggtcagctggcaggaaacccaggagagtcaatgttccagtttgagtctgaaggcagtctgttggggaatttcgtccttctctgggaggccagcctttttgttctatacaggccttcaaccgattggatgaagttcacctttattagtgagggcaatctgctttaaccaaagtttactgatttaaatgttaatctcatccaaaaacacccacccagttgacacataaaattaaccatcactctctgtaagcactttctatgcattaagtgatagcaaataatgccagacatagggcgtctttaataaatggtaagcactgttatcagcaacaacaggattattataattagcaccttttcatctttctgtctgggctctgagaaagtacctctcttctctaaatttatccctcctttcctatgaattagacccagtgctttctctgaattatgaaggtcacactcctacaaatgccccttcccaattgcacatctgtcggctttctttgccattgacttttatctctagcttttaaatttacaggcatatgtcagttaacaatgggaatgcgttctgggtaatatgtccttaggcaattttatcgttgtgagaatactatagagtatacctacacaagcctagatgtcgtatagcctactacacacctaggcaatatgacatagtcttttgcttctaggctacaaacctgtacggcttgttactatactgaatactgcaggcagttgtgacacagtggtatttgcatatcggaacatgtctaaacacagaaaaggtgcactaaaaatactatgtagtgatctcatgggaccaccattgtatatgcagtctgctgtagactgaaatgtcatgcagtgcataactgtatcttaaatactcaaagtatcacctttgtttgtttgtccccttgtgtgcatcatcctaacgtggaatttctctgttgattagggccagcgtattagtttgctagggctaccataacaaaataccacaaatttggtggcttaaataacaggaatttattatcttatggttttgaagactagaagtacaagatcaaggtgttggcaggtttttcttctaagggccatgaggaagagtctattccatgcctttcccctaccttctggtggtttgctagaaatccttggcattccttgacttacagaggcatcaccctgatctctgttttcatcttcacatggcattctccctgtgagcctgtctctgtgtccaaacttctttactattaatataaggacaccagtcatattggattagggtctactttagtgacctcattggaatgttattacctctgtaaagatcctatctctaaataaggtcacatccttaggtaccgggggttaggactcaaacatacctttttttggggaaacacaattcaacctataacaattgataacactctttaggagcagaatgcgatatggaagtaatttgagaccataaagtatatacatgtagggagttaatctatgaaacctattgaaagccatatatacctcatgtatagtggtccataaatagcatggagacattgcagaggatgttaagtgatatgatacaggaacaatccaagaaggtcataagaaaaaggaccttttgctcttgagaggactgaagaatgactttccatttatgaaattttggtacatgtccactaaaaataggatgaaggccaaacttaggaagaatattttgataatggagaaggttgcatataaaaacattttattgaggacaattaaataatgttggctggaagttttaggatgatcatctttaggactcagaaaaagagaagaaacattattaaagaattgtccctgaacaagtataggcaccctcacatttgcattgcatttactatagaattgaaaaatgttttgaccttttttttttggcttttaatatatttgaccaagagtaacagctaagcaatacctatttgcaatcagtgtcatcatgtgggctccaaacatatcatgtttgtgtaattaattgattgacccattaatttgttcaatttctgctctgttccaggcactgaacaacatgatggagataaaagataaatattacacctgccttgtcctcaagaagttagtcttctgagggaaagaaattagcaaacaaattgtaatctcagttatgtgccatgttccatgctgggcacaggggatacagtagtttaaaaaaaacacaagatctataaggtgtttcttcttgtggaccttacagtctagggtgcttggaaacatggggcgttggcagacaagtaaatacacattttgtggtaaaggctcaggtagaagaagtacaggatagaatagagcacaccatggggaattaatctagacttcagagaggctcacacatacataatttatgtgtgactatttcaatgcatttgaggtttcttggaaatagaggttaggttttattttaaggaagttaccattttttttttcagtgtgatgtggttgaaccaaagaatgccatgcccagtgatggtaataggataatctttttaaaaattaagagccacctaataaatcaatagtttcattcagcgggagctcctgcagagttcaaaaagaagagaatctggcacagcgtttcctttaaagttcattttcctagagtgtgaatggaagcaagagattataacattttgaggtcaaaaaaattctgaaatgcctataaaaattattttctccaaattatcatcatttgtgcttttaatgacctgattgcaaagatgaacattttgaattcttaaattgcttattaggattggttaatgaatcaattatctattactgtatgttttgctattggaaaaaatagcaacttaagtgttttgcagacctttacttaggtatatgttgcttttatgaaaaaaaagatgtaaatattaagtaaaagggatttaaagcaaggcttttgaggtagagtcttattaattccttggtaaaccttgagccaattgttgtctatgttctctgcctctgtcttgctccttccttctgggattcactgtgggaatgcgggattgttaatctggggatgctgtccaatcctgcctctctcaagctttgctattgatctccctcccagtgataataaagcttgaagaaaatgaaagtagcgttagtattggtcctcaaactcaagaacaggatgaaacttaaatcttgagtcatacaattgtgtctacatactgctccccaaaaagagaagtaaagaagatgctaactttcccttttaatttgcagtacttagcaatttgttttcttgagggttaagtaataacagtggaagaaaaaagggttaaaatgccaccaagaacccaattccatgtttagtttgaaagtgggaaatcagctgccactgggaagtctgaatccaatgccatgatgttctttgaatccttctgagaaataatcatgtgtagccataacatacctgtataacagagcagagaacataaacaaatgaaggtgaagggaagattaagacagaagagaaaaattccagaatcgactgatcatttttatctgtttagatgatttcaggcagaatcctagagaccaactttatcacaactgaattttaaaaatcaccagctttgtcattgtgatgcagcatcagtttcagtattatccttggagtattaattcttaatcatcttcatcttagaacatttttgaggtcacttctagtctctatttcaccagtgaagaaacaaaaatccccaaactatatcaggtggaattacacagtattttttttttaattttggggaaagtcgattcaaggcagtaacttgcaagctagtgttagaaaggatttaataaatagtggtttttctgtacacatagtgagaggtcattacatcatttggttgttgaaagtcataaggatgtctagcatgcgctttgcctgtagtggttcatgccaggcagattcctgactcctataacccagagcttatcagagcatttatgtccccaaagagaaatgtcacctccatctttcaataaacactttagcaaagaaaaatcaagtactttaattccaaatcttgagttaattccagaataacaatgatggctcggaaaaatatgggtatttctgtcaaaggacagagaaacctagtagagagtatttactttgggtcctagtgatggtatctgaacaagctaggtgaacaaagagcctcaataagggattttgaggtctagaaaaagagaggaaataccaaataaatggaataattataaaataaataccagcaaagttaaatcaatatatcatgtgggagatatccttatatcactcatgtgatttctattttgttcctatattaggccaaggagaggtggaacttgttttcctttttccctctcagctacgaatggacatacttaaaactgtttctctgcttctgttctctaaaatgtgattgtctaacagtaaccgtgatgacgttttgacagttgcacaagtttctttctttaagctttaaaaatgccagccagtaacccagtggcatttctactataaaatcttaaggccaatccatttccccttttccttattttcttggtttcaaatatatttttattgccaatggaaataaaaatcctaaattagagagcaatggcatcccttgtcttgtgaataaagagctcctaaatgtgaacttatacaggatgcagcaatttatagggtagttaatcattcttctttctagccagttgttccagctacagttttgtggctcttgttagtggcttcattcccagatagaataaaaatcaaaccaaaatcctggaaaggcactctgaggatgcttctctaaagtagatgggcatcaactataaatcacaatgctttgtttcctctgttatgtttcaagatgggtgggattttttttgtagcattacttattattgcctctcaagtgcttgagtctttgaaatccaagtcatgtgagtgaattagatacagctgttagaagtggcctttcaatgccaatggtacacattccttggtttctttacgatactattgctcttacaacttttatctgaagtcataaattcatagttgtcccagaagttaagttccttgcttctagaggacagaaaacaaacaatttacacaactcatggtgcatgtcaccagtccttagatctcatgaaatatgcatgaaatcttaaatcacttgctgtagccacccagccattgacatatttgaaagactttagtgtatcaaagtcactataatgaaaattttgatttcaccagttctaggagtgaaaaatcaaatgtttagtaaaactttctaaaattaacactgacagttgatttctgtatactgttgttcttaataatagctttattgagatataattcatattcaaaacaacttacccatttaaagcatacaatccaatgattttttagtatcttcaaagagttgcctatcaccataaccaattttagaacactttcatcactgtaaaaagaaactccattcctattagcagtcattccttattccaaatccccctgctcgccctagacaactacaaatgtactttccatctctatagatttgcctgttctggaaattttatgtaaatagaacaaagtgttcttttgtgactggcttatttcacttagcattttttttcaaagattcatccctgttgtagcgtgtatcagtgcatcattcttttttatttttttagagacagggccttgctctgttgcccaggttggaatgtgcagtggcatgatcatgggtcactatagctttgaagtcataggcgaaagcggtcctcccacctcagtctcccgagtagctgagactacaggcttgcaccacatgactgtctaatttataattttctttagagacagggtcttgttatgttgtctaggctgctctcaaactccagggctcaagtggtcctcctcccacagcatcctaaagtgctgggattataggtgtgagccacagcacctggcttgcatcattctttttattgttgaataatatcccacttgtaagaatatgtattttatttatcctttccccagttaatagatatttcgattgttcctaattcttgtctattataaataatggtgctatgaacatttgtgtacaagtttttgtgcagacatccattttcctttcttttgggcatatacctacgagtgtaatggatgggccatatagtaactttatgtttaatattttgaggatttttcaaactgttttccaaagtggctgcatcattttaaattccttccaccattgtgtgagtgtttcaatttctccacatatttgcaacacttactattatctactcttaaaaattacagccatcctactgggcatgaagtggtatttcattgtgagttttttttttctttttctttttttctttttttgctaatgtttgtggattttcttttcattttcttgatggtgtcctttgaagcacaaaagtatttaattttgataatttccaatttattttttgttattgctgtttgtgcttctggtgttgtatctaagtgtatgctactttaaaaaattagttgtaatatggcaaattggatacatgtgtaggctttggtgtcacaatcctaattttaaaattctgactctgcccttgacaaattaactaattaagcttccttagcctcagtttctcaactgtaagttggagatattaccaagacctacctcttgaattgttgtggggatcagatgaaataatgtatgtgaaatatttagaattatgcaagtctgtggtaatgaatactaatgttagctatcattattgttataatcccaataataaattctggtgctttgaaaattaaaccaaagccaagcagttgatatgaagaagcatgtaataatgtacagacataatgctttatagacaacattgaatttggctctcatgaacatcaggaatagtggtcatggtagttattatctccagcaggaactgtagctgagagatcttcagagctttttccaaggcgatatcactgggaaataatagagacaaggttacaagctagggctgtgttttcttcttaaaatctttagttcagtttttttcaataacagatttgtagtaggcatcaggtgactggggattcgtattcttcaagttgaaatattaccttgttgagaaagaaaccatgtgtgagacaaccatgttgagaaagaaaaagtgattttatagaaaattaatattgatagtgagcattatatgaaaatcatgaagttagaacatatttggccagaaaatttacattaatagttacccatagcaattaatgcattataattacacataccttttctttaatgaaaaagaattctttccttccaaagttatgcatgctattgttaaacattagagaatatagagaagcaaaaaagaaaatatcttttttgatattttcttaacatacgtctgttcctaataatgtttatagtttagaagcattgcatgaaatgggtagatcaattttctatttaatgtttggattcattaggtacgaagttagcaaattaatttccattagggtgcctgtatggttgtaaatcctggacctgcagaagatttttcagtattggtttgtagtcttttgtttagcagcaaataattagttctccagagcttctgaaattaattgaccactttaatggtgtttacctacctagagaaagaaaaagaacttctccaagtcccttggtaaaattaagcctcatgaacaattaactcaaatatacacaaggcttgtctttagcgagcatatactccctaaagttgattaagctgaccaagtgattactgcttataaattcaccattttatggagaagaagcaaacactgctaaataccttgtggaatcagaggaggggaaattagtaacttgaccccaatactgcgattttaaattgaattcttgaagcctacaagttttacacaggactttagagagctggatagtatcactttgtcaagtcctacttttactatgattctttgagaaaaatacatctgactaaataactctgaatctaaattggataaaataaatgtgacattcaaaatgttatttatgattttagaaaaatatccttatagacactagatgagttttagtctcaaatcaatcctccctatcatagtcacttatcaaaataactaaagcaaagtggtagagctgtgctctagaagtttgggatttatgatcacaatcttttccaatgagtcccctctttcctctgcctgtcttcaacatttgtttttttttttttttggttaggactatccagattgtgtggcctatttcaaactcatggcaaatacattggatgatcagaaattttctaatgtatttgaatttgtctacacaaactagagtaattgctattaattcctcaagtgttaattatttcatgcaaaaaggaaaaaggctattagtctttaagtgtattagtatgtcaatatttgggagaagtgtcatgcaattagtggtttgaatttcctattttattttattgcattttattttatttgcctagtcaaataaaaagtaatgttaaatacatggaagcatgattgttttctacactaaaaatcattttgacttgaaaagatctgatatccatgaccttcatctgaagttttggcagatgaaaatgtcagatgcgtcttttggattaataaaaggcaaaagtcagatcgaaaaatgagtataagctttaattatatgactttaggaggatatgttatgaaaatcaaagctttaatagtgattataattggcaagttctttttttataaggaattacaagtcactctatacaaaaattggaatttttgtcctaagaaatgaaatttactatagtttcatctgtgtgtgtgtgtgtgtgtgtgtgtgtgtgtgtttaaaaaatcaagtgatagggcttttcctcaataaaatctgaaatctcttatagttaagtgaacagaacagtgtatctaggatgctagacttttttttcaaagttagtttaaaacttatacatagtaaaatctgtatgccttagggatctctgtttgctatcccatagtgaatgattaattagtttctgttagaaatagtcagaactaggctgggtgtggtggtggctcatgcctgtaattccaggactttgggaggccaaggcaggaggatctcttaagcccaggaatttgcaaccagcttgggcaggctggtgagatcctatctctacaaaaacaaacaaacaaacaaaggacaataagaaagaaagaaatagccagagctttgaacaaaatttctaagtagaccaatgtaaaagtctgtcgtcaatatgtagtggctatgaatggaggttatgaatgaaagagaaggataagatgaactagaggtgagaggggaagacagcaggcccaagtgaaaggcagagccgagtttattgctttttggttattccaggtgtgtctgctttgtctcatgaaacacctggatgatcactgatttctagtggaagaaatgctgaaaagtccttactgtgcatttaaacattctaggtttaatatactcagggtttttcaaaagaaagggtggctggagttttgcactaactaatatttcataaagtgtctaagtatagatgtctggtttttttttgtatttctaagactggcttgaggtaggcatggagaattctttgatgggacataattttcttcctttctttttttttttttttttttttttttgagacggagttttgctcttgttgcccaggctggagtgcaatggcacaatctcggctcactgcaacctccgcctcccaggttcaagcaattctcccacctcagcctcccgcgtagctgggattacaggcatgtgcccccatgcctggctaattttttttgtatttttagtagagatggggtttctccatgttggtcaggctggtctcgaactccttacctcaggtgatccacccacctcggcctcccaaagtgctgggattacaggcgtgagccaccgcgcctggcctgatgggacatatttttcattcaattttattgatttaacctcacaaaataaaatatttccttaagatgactctgtggtcattgttgggcagcataagcttaatggattttagttatcataatttaccttaaacccaatttgtatttcaggatataaatagaggtttattgtagtgaatcttccaggaaatactaagtgatactaataattatagatggtgaacttaagtctttatattactgaatttgtttggtttgatgatgctaggctatggcattcttgctaatcaaaacgatgtgtcatggtgtaacataacttattaaaatgggcacagataacacaggaagctttttataaaagcagctcacaaattgtgttactttgaactgaactggccatttatgggaaaggtcactgggttgtaaataaggaccaaaagagttacgtttatattttttaaaagagattgaggagatttatttttacatttcttgaaaatgccttattttggtatggtattgacagatagtgaaattctgctcatttgtaaatatagtgtcatattttaataatttcaaacatattgaaaatgcagaatttattaatagtgggagcacattttcctttttactaaatgttctacaggttcttttctttccatccacacacagtgccattaccctcattctaagcctttcaaacatctggcagtaagtgatctgctgcacttagctctttccagctgagctgatttttaaattttcagaaaatttgtgagctaattgttaaacatggccattattaaaaattaaattatttcaacttataattaaataaattatattaaaacaaaagtattaaaaactcaaaagttggctgggcgcactggctcacgtctgtaatcccagcactttgggagaccgaggcaggtggattgcctgaagtcaggggttcgagaccaacctgaccaacatggagaaaccctgtctctactaaaaatataaaaaaatagccgggcatggtggtgcatgcctgtaatcccagctactcaggaggctgaggcaggagaattgcttgaacccaggaggtggaggttgtggtgagctgagattgcgccattgcgctccagcctgggcaacaagagtgaaactctgtctcaaaaaaaaaaaaaaaaaaaaaaaagaaacaaaaaaaaaaaaaaaacaaaaagcaaacaaacaaaaaaacaaaaattatcacttcctaattattttgcattttactattatctatgctattaacgttatttgccttcattgtatttgaaaggtggactatattctattgcactttcattgtactatattctaatatgcaactgtgtatcccttcccaactctgtgttcaatgactttatatttggttgctttaaaatgatgacgatgagagtatttatatcatagaaattggcaaatgccgtaagtcagtttttgtttttgtttttgttttccggagaggggattgttaaatatttgcctgcatgcaacaccactacatgcagtctgctatcttttgttcttcctgctttcaggctcctctcccagctgtctgtctagcacaacccagcataccaaattttcttaaatagggaaagttgaacatggtaaaagaatgaatgaagtcaaaagaatgtggaaagacctaggctttgccatttagtaaagtttagcatctctaagcctccatctctttatcaataaaattgagcaatgatcccttttagttctacccatttaagaagattttcaaatgaaaaccacaacctgctcatgtttatgaaggcactttggaaagcgctaaatacacgggtttttattagtagtaaacacttacttcacctttttcacttcttgactttagtttacaagggctcataatctaaattatatcataaattgctgtcccagatttttttacagcctaattgccacctgtatgttcgactttccttctgttctttatgttagatactgggatagtatgcaccaggtgggtgtgccatcactttctcagatgatgtccactgaagaccttgcatgatcatggcattcattttcctgctgtattcagactggcctcaactattttctttattgctctccaggaaaaattacaaatgaatcagactgggcaatgaagggtaaacctaattatcgctctttgttaaagacagctcttgttaaaatgcggatattgcaaattaatggaaaaaatatgacatagtaaaccatactcacttattaatatcttagtaaggaataattgatgaagttacttaaccttagagccctaattcagttaagttttaatgaaggacaagttgtagagatatcgagaacccagggcaggtgcctactgaagaagttccagaccaaggaagtataaagaaggacctgggtgggagcagtgagattggatatgagggccactggcaaagttttgccccagaacagtgtcaaaatgtttgcatttggcatagccctttctctttttgttctgaatggctttgctagaatatcttttctataatgaatttatcctgcttctcagatattgctaaagcactcccttttgaattttggtgctttaacatgcattttgatacattaccaaataaggtctgaatgacacaaattttagaactctccagagaaaagaaagatgctgagggaaaaagcataggtttgggactcactaaatcccagttcaattcctttctttaataaatatattcaattttacctgagaaagctctcgtgctctcgaattttatttagaaatttctctttgtacatgattgatttcacaatccttcttctgcctcctcttctactttcttctttctagattttcctatctttatgaagattattctgccttatcctcaacagttagaaacaatatttttgaaaatcactacggtatcctgcatagtgatttcccatgccaactttactaatttccattataaattattatttattgatgcctagagggcagatgagtgtagctgctatggagtgaggagacaaaacataagaaagttatgatcctaccctcaggtaatgattcagacatgataattaagtcaacaaattgatagaaactaatcactaactctctggctatagtcattctttcaatgaatagctcattactgagtatgcatgctacagtaacaaaattatataaggctgttgattaaatgttgattaagtgcatgtcttattcagagtttttttatatttgaaatggaagaggctggacttcagtaatttgctataaactgctagtatatgattatttgggggcagttattttttaaagaataatttaaatatggaatgtttagcagtttgttttttccctgggaaaaaccatactattattccctcccaatccctttgacaaagtgacagtcacattagttcagagatattgatgttttatacaggtgtagcctgtaagagatgaagcctggtatttatagaaattgacttattttattctcatatttacatgtgcataattttccatatgccagaaaagttgaatagtatcagattccaaatctgtatggagaccaaatcaagtgaatatctgttcctcctctctttattttagctggaccagaccaattttgaggaaaggatacagacagcgcctggaattgtcagacatataccaaatcccttctgttgattctgctgacaatctatctgaaaaattggaaaggtatgttcatgtacattgtttagttgaagagagaaattcatattattaattatttagagaagagaaagcaaacatattataagtttaattcttatatttaaaaataggagccaagtatggtggctaatgcctgtaatcccaactatttgggaggccaagatgagaggattgcttgagaccaggagtttgataccagcctgggcaacatagcaagatgttatctctacacaaaataaaaaagttagctgggaatggtagtgcatgcttgtattcccagctactcaggaggctgaagcaggagggttacttgagcccaggagtttgaggttgcagtgagctatgattgtgccactgcactccagcttgggtgacacagcaaaaccctctctctctaaaaaaaaaaaaaaaaaggaacatctcattttcacactgaaatgttgactgaaatcattaaacaataaaatcataaaagaaaaataatcagtttcctaagaaatgattttttttcctgaaaaatacacatttggtttcagagaatttgtcttattagagaccatgagatggattttgtgaaaactaaagtaacaccattatgaagtaaatcgtgtatatttgctttcaaaacctttatatttgaatacaaatgtactccctgggaagtcttaaggtaatggctactggttatcaaacaaatgtaaaaattgtatatttttgagtacctgttacatgccaggtagaatatctcctctcagccactctgagtggaaagcatcattatctctattttacagaaaagcaaactgaggctcagagagataatatactttgccagttaatgaatgatggagccatgattccagctgaggtctgtattgccttgctctctaggaatggtagtcccccccataaagaatctctcagtttcctttccaatcaaaaggttaggatccttttgattgccagtgacagaaacccaatttactagcttaagtaaataaaaggaacgaatttattggctcatgaagcctgaactatgtgaagacctaggtggagaactggccttaggaactcaatgggaccaaggactcaaatgccacctggtggcatttgccttatgctggttttattttctcagaccggaccagctttctacataaagtgggtccctggttagaactctttgctcctatctttaaggaccacgaaagaaggagccctttgtccttggctaaatgtgaaaaatcccagagactcttgagtcatagtgcttaccccttgggccactcatagtctagaatgaactaggctgagtctcgtgccaacagcacaggcctgatgccagataaaagggtgagtgaagggggataaaaaataagacatagctactaaattattgcaccaaagtaaaaacattgagttgacttgcaatttgtttcttttaattaaattcatttcctttttttggcattttgaaggcaaagtaagatattaaactttatttttattgattttattcaaagaattaagctagtgggagtagcagattcacacttctaagatcaagggccagcttctattattgaacacttggtgtgtgcaaatgccatgaggtagggatactttgttttgttttttattttttattgggttcgatctcttttgtttatgatgtatccccaagtgcctagaatagggcctggcatatggtatatactcaataaatatttgttgaatgaatccatgatggaatgtgaaatggctagcattacatagaaacctgtagcattgctggagagataaaatatataaacataatccattgcaggtatattgacaagttcaaaataatataatgggtattgaatatctaaatgtttgttgttgttgttgctgttgtttttgagacagagtcttgctctgttgcccaggctggagtgtaatggtgcaattttggctcactgcaaacttcgtctcctgggttcaagtgattctcctgcctcagcctctcgagtagctgggtttacaggcactcgccacaatgcctggctaatttttgtattttagtagatgtggagtttcgccatgttggccaggctggtcttgaactcctgacctcaagtgatctgcccaccttggcctcccaaaatgctgggattataggtgtgagccactatgcccagctttgaatatctaagttttaattggatgctgagggaatgattaatcagagtagggctgggttaattgaaaaatgtgatacatttgtatttatggccagatagagaacatgaatctgaatttgcagaattatctggcttaacatttttttctttccagttttcactgtatcccccatgttgattcaatttaaaaaatatacctattttacttcaattcaacaatgctatgccagtacaaacccatacgttctattatttttgttttgttttgtttttgtatctccaccctgttacttcttttcttataaaattggtatttgaaatttattgaaatattttggaagagtgacataccatttttggtactttgtacctctgcacccttgggaagtgaccctggcttcacatttcataactgccttgtgaccatggccctcaagtggttgccagatggttgaagaacattaacctatctggctcaattttgtgaccatggattgaatcctctacataactgcagtgtgcaaaccacacatccgttccaagattgtagtcaggatatgaactttttaagaataaaacttcttcccttctgatctgggcctggtatgtggtcctactagaaccacatcacctactcttggtgctaacaatttgtggcaccaagttgttcaagtttcacccattaaagaaattccccgaccttgccttctcctcaggtaactaccccattctattttttctttcatagctaacattctctgctctcctggtctctctacttcactttcatttacatctcagctcctgaagtatggtttccaccatgttcctaaaactacattgcccagggtcactagagacctcttatgaaatataacaacacctttctacattacttccgtgtggaccactttttcacattgaacccattttgttggtttatgtacacaccccttccttggctttcccatctgatccatttctcctttgatggagaaggtgagtctgctccatatttagcttcttactctgagtaaccaaatgttatggatgggaggttagctctgtgtgtgagagaaaggtggagaagcatgtggggagggaaatagatgggaaaaggtaattaggctttatagaagggctctcattagcaagcttctaggggatgccaagatccatgcttagagattgccaggcttgtcttcaaatctcagctgtgtattactcctttatgttttttgtttgtttgtgttgtttgtttttgagacagagtctcgctgtgtcacccaggctggagtgtagtggtgtgatctcagctcactgcaaactctgcctcctgggttcaagcgaatctcagtctcctgagtagctgggactacaggcatgcaccaccaggcctggctaatttttgtagagacggggttttgctatgctggccaggctggtcttgaactcctgacctcaagtgatctgcccgccttggcctcccaaagtgttgggattagtggcgtgagccactgccccggcctattactcctttagagtgatttagagccatgtttacttatggtaacttgacagtaatgggaataaccactgatgaaacgtaaagcctttgtctaattgtttacctagttcttccttgtggttcatgaaatttttcatctctgtacagtttgaaaattaagatgataatatttagagatattttattcctttgtgaagagaaaaaaggctttcattaacagaaatcagtggcaataacttaataaatacaatcagctggtgttcctatagtatttaaaagaaaacagaaagtttactagatttcagccagttttcagactatttaatgtctattcttactataatagaaaatatataatttgatcttgttctcatttttcaaagacctttaatacatgattttagtagttgaaaatgaagtttaatgatagtttatgcctctacttttaaaaacaaagtctaacagatttttctcatgttaaatcacagaaaaagccacctgacattttaacttgtttttgatttgacagtgaaatcttataaatctgccacagttctaaaccaataaagatcaaggtataagggaaaaatgtagaatgtttgtgtgtttattttttccaccttgttctaagcacagcaatgagcattcgtaaaagccttactttatttgtccacccttttcattgttttttagaagcccaacacttttctttaacacatacaatgtggccttttcatgaaatcaattccctgcacagtgatatatggcagagcattgaattctgccaaatatctggctgagtgtttggtgttgtatggtctccatgagattttgtctctataatacttgggttaatctccttggatatacttgtgtgaatcaaactatgttaagggaaataggacaactaaaatatttgcacatgcaacttattggtcccactttttattcttttgcagagaatgggatagagagctggcttcaaagaaaaatcctaaactcattaatgcccttcggcgatgttttttctggagatttatgttctatggaatctttttatatttaggggtaaggatctcatttgtacattcattatgtatcacataactatattcatttttgtgattatgaaaagactacgaaatctggtgaataggtgtaaaaatataaaggatgaatccaactccaaacactaagaaaccacctaaaactctagtaaggataagtaaaaatcctttggaactaaaatgtcctggaacacgggtggcaatttacaatctcaatgggctcagcaaaataaattgcttgcttaaaaaattattttctgttatgattccaaatcacattatcttactagtacatgagattactggtgcctttattttgctgtattcaacaggagagtgtcaggagacaatgtcagcagaattaggtcaaatgcagctaattacatatatgaatgtttgtaatattttgaaatcatatctgcatggtgaattgtttcaaagaaaaacactaaaaatttaaagtatagcagctttaaatactaaataaataatactaaaaatttaaagttctcttgcaatatattttcttaatatcttacatctcatcagtgtgaaaagttgcacatctgaaaatccaggctttgtggtgtttaagtgccttgtatgttccccagttgctgtccaatgtgactctgatttattattttctacatcatgaaagcattatttgaatccttggttgtaacctataaaaggagacagattcaagacttgtttaatcttcttgttaaagctgtgcacaatatttgctttggggcgtttacttatcatatggattgacttgtgtttatattggtctttatgcctcagggagttaaacagtgtctcccagagaaatgccatttgtgttacattgcttgaaaaatttcagttcatacacccccatgaaaaatacatttaaaacttatcttaacaaagatgagtacacttaggcccagaatgttctctaatgctcttgataatttcctagaagaaatttttctgacttttgaaataatagatccataatatatattcttatggaaatctgaaaccatttgggcatttgggggtaaaaagtattttattagtaaatttaaatgaggtagctggataattaaattacttttaagttacctttgagatgatttttctcaatcagagcaccacccagagctttgagaaacaattttattcacagcttctgattctatttgatgtaatttttagaaaataagttttgctggttgctttgaatcagggtatggagtacagttcactctgatcctatcatataaatcatgtaagtatataacattttcaataagtgattgttggattgaagtgaatgatatttcaagtaattgttatgtcatggccaagatttcagtgaaactcaaaatttctcctggttgtgttctccattgcatgctgcttctattgattaacctaagcactactgagtagaagctggaagaggggtctaattagaaggcccctttctatgctctgcttggcttgtaaaataatttatttctctagatcccaccaacatagtagtttcatgtatgcaaaaacacccacctaaatgtcaaagtttgtatgatacatggacatatctatagaattttttttggtctggtgcatgccaaaaaataaacatgatatagaagaatttaatatttattgagtacctaatctgttccagttcaatatgaaggtctttatgcagattattttacttaattttcctagtaactccatggagcaaaaattatctctaatttatataacaggaagttgagcgtgaggcaaattaagtaactttcccaaagttacacatatggtaagtttgagagatatcccagtctctttagctccaaagcctttgaccctttcaccataccagattatgattgctattaatatataattataattataatgattgtatttaggtactcaacagaatggtgactctagtaaccagccttggttctgctgagcttctctgcgtcttctcaggagacacaggctacagagcttgaaggctgaggattcttccagggtcacttcaggggcaaatctgaaactttcttcaggacaggaatcaacgagatcttctcacttacttatacctgggggaggaactgtatgaaatccacccaagaaccagtcatgctaagggccaaacctatagacaaaaaaagggataggagaatggagtatgtatggagaaagactaaattgttcttaaacttctcaagcttaaaaatatcccagcaaaagagatcgtaaaagcccttcatggcgtattaattatccatgcatgggggtgagtggaaaggtactcctgagcccgaggctacagctttggaactagcagcacctttgaaggggaaagcgtgtttccatcatctcaactcctactgataaccaatggaatattggtgagtaaaggatcctgggggaagaagcagctgaaatgtgtaggtgagaaggcagagagaagaatatttatattgggaatggcacaagtgtgatgaggctgcaggtttttcacccttgtcatagagaaaaaaccacgctgacaccatgcagttttaaatagtgagaaatttgcaaattgttagatcttaaataatttagataaacatagtggccatttagattattgcagttttttcaggatatctgatctcttgatttcattctttttgtctcttataagaataaaagggggggagaaaatttagccattatagtatttctctacattttctctgtccttttacataacttacaccagtgccttcctatttatggtattatttatgggtatttcttcttttctttcactgagcaaggataaatgagccagggattcttgaaactactgtaacacttctcttagaaatagatggtcatactttcagaatctctacacattcttagtccctctaaacaatgatagttgtggcataaaaatatttgcttggtttcaggactgatagagaaaagtactataaaatttgctgttaactgtgaaaggttaaaaaaaaggaggtgccatcatgaaggagctaatctttctgaagtactgctgtagttttaaatattattagctatgacttctcaccattaactatgcacttgctttttcttcatctgactcagcagccagatagatgcaacattgtctttaacatttaagactcctagcaagtccgggcacgggggctcacacctgtaatcccagcactttgggaggccgaggtgggcaaatcacaaggtcaggagtttgagaccagcctggccaatatggtgaaaccctgtctctactaaaagtacaaaaatcagccaggtgtggtggcgtggtggcgggcacctgtggtcccagctacttgggaggctgaggcaggagaatagcttgaacctgggaggcagaggttgcagtgagctgagatcgcaccactgcactccagcctgggtgacagagcgagactccatctcaaaaaaaaaaaaaaaaaaaaagactcctagcatggaagagaaactggctgttgaaaacctgaatgtgagagtcagtcaaggatagtttgagggaagccaagtagaggaagctctcacaagcagattggtgagagaatatgattatacaatgcatttattatgataagaaattcacaagcattcattcaaaatactcttgattcctaggcagctctgggcatatttccaccaacaaattgaggcatatgtcagtgcagcctaggtcagactaccttttttcattaaacctcacaaaattaaaggacatacaggagaagtcctggtactcatgttgcagactacagtctatatggcaaaggaggatctctgtcccttatgtttggatgaaaacattgggtaggcatttgaatacaagcctactgctaatatggggctaaggtctttggccccctaaaggtttgctgaaatattactgacaggaggcagattgataagaggaaaagcacataaatgtatttgacatgtatacatgggagccttcaggatgaagacctaccctctcagtgcagtatggaagcttgtataccatcttgaggttacagaaagaatgggggtttggatctttgtaaaacaggtttcagtggcaagacaggttatgagaaggagaaaggaagagacttgggtagcaaagggggtcttgttttgtaggtaaatcgttggcagcccacagagaaaatagatggagaatgtttcttttcagaccttggcaggtgtcagattctcagttaatctctcctagatttgaaaaaaaaaaaaaaggtctagaaagggagagcctggctgcactaacacattttctacagatgcaaatttctcccacaaaatacagctttgcaggtccacttctatctgctgggcctgtggcaaccatttcaaaatatgtgaatgaaatatatgtgggggtaaactatttttatttacttccctaaagaagggatggtgttctctcgggaattctgtgcatagagagcctgtggcttaggcactttgatttatgtatatctcttcctgtgattggctatctagggactgctatctccagcaaatcttctaaatgtctgccatgtagaattcctttctcatctttctgtctcacccccttatctagctgcttctctaaccctagagtgacactgcactccccacaatctcctatgtcctgaatattttaccccatcctaaactccatctctaacacagatgcactttcttgtgctgcctactgcattgtacatcttccccttagttcccatgatgcaactctgccctaccccagaaaatgtaatttaattggtctgggataaaacctgggacactatcattcttgaaatattccccaagcgattctaattatatagccaaagttgagaactatttgtagacaggcatcagcatgatcacttaatgatttgacttttgctagatctaaggtgaggaaattggagagtggtatccataggaagaactgtttagtttaattttttttttattttttcttctaaaaaaaaatccaacaacgagatacatgtgcggaacatgcaggtttgttacataggtataatgtgccatggtagtttgttgcacctattgacccatcctctaagttccctcccctactccttacttcccaacaggccctggtgtatgttgttcccctctctgggtccacctgttctcaatgttcaactcccttttacgagtgagaacacatggtgtttgattttctgttcctgtgttaatttgctgaggatgatagtttccagcttcatccacgtccctgcaaaggacatgatctcattcctttttatggctgcatagtattccatgatgtatatgtaccacattttctttatccagtctgtcattgatgggcatttgggttggttccatgtctttgctattgtaaatagttctgcagtaaacatatatgtccatgtgtctttatagtagaatgatttatattactttgggtatatacccagtaatgagattgctgggtcaaatggcatttctggttctagatacttgaggaatcgccacactgtcttccacaatggttgaactaatttacactcccactaacagtgtaaaagcgttcctatttctccacagcctcaccagcatctattgtttcctaacattttaataactgctattctgactggcatgagatggtatctcattgtggttttgatttgcatttatctgatgatcagtgatgctgagatttttaaaatatgtttgttggccatgtaaatgtcttttgtgaagtgtctgttcatatcctttgcccaccttaatagggttttttttttcttgtgaatttgtttaagtgccttgtaaattctggaaattagatctttgtcagatggatagattgcaaaaattttctcccattttgtaggttgcctgttcactctgatgataggttcttttgctgtgcagaagctctttagtttaattagatccaatttgtcaattttggctttttttgcaattgcttttggcattttcctcgtgaagtctttgcccgtgcctatgtcctgaatggtattgcgtaggttttcttctagggtttttatagttttgggttttacatttaagtctttaatacatcttgagttaatttttgtataaggtataaggaaggggtccagtttcagttttatgcataatggctaggcagttttcccaccaccatttactgaataggagatcttttcctcattgcttgtttttgtcagatttgtcgaagatcagatggttgtagatgtgtggtgttatttctgaggtctctgttctgcaccattggtctatatgtctgttatcgtaccagtcccatgctgttttggttaccgtagccttgtagtatattttgaagtctggtagcgtgatgcctccagctttgttctttttgcttaggattgtcttggctatatggagtcttctttgattccatatgaaatttaaaataatttttttttattctgtgaagaatgtcaatggtagtttgatgggaatagcattgaaattataaattactttgggcagtatagccatgttcacaatattgattctttctatccgtaaggacgacactttttccatttgtttgtgttctctcttatttccttgagcagtggtttgtagttctccttaaagaggtctttcacatcctttgttagctgtgttcctaggtattttgttctctttgtagtgattgtgaatgggaattcattcttgatttgcctctctgctgcctgttgttggtgtaaacaaaattcatttcttgttcttatttgtgaaattttggaaccaaatctattttcaaattagaaattgcttgtgataatggttttgcaacttagactggatatgagacgatgagatattagttctttcattcctttgtaggaatatggtgcatcttgcattattttagctaactagtgtcctttaatgactaatgaatatgacatggtgaaacaaagtaaaatatatatgatgcactaagtatgcattgtttccaaaggttcagcattttttttttgttaactctgctgggatctgctttatgcactgataacataacttattttatgatcttaagcaaataaaaacacttatctggacctcagtttccttaactgtacaactgagggaaactgtatagtatagctatagtacagtataccatctttaccgtcacttccatcttttaaattatgtgtatataagatagggcctagataaatggtatttatcttaaattacagtgatactagcttataacttaatttgctaggtcatgttgaactgataacaatgtgtgaactgatgagcaactgagaagtaaccaggttgtgttataacagtttgtttttgatttagggttatcagtgagggtggcggtggggaggggactttggagtctaactgtctagttcaaatattagtttttgtttatttttatttttaatttttgtgggtacatagtagatgtatatatttatggggtacatgtgatgttttcatataggcatgcaatgtgaaataagcacatcatagagaatggggtatccatcccctcaaacacttatcttttgagttaccaacaatccaatgacactctttaagttatcaaatcacagttttgccagctactagccatgtgattttgggtaggttacttaaattctcttcatctcaatttcattattgtaaagtggagataatgatagcacattttttctttttcttttttcttttattttttattattatactttaagttgtgtgatacatgtgcagaatgtgcaggtttgttacataggtatcaacaactctataaaacatgttctatccaggaaaagaaactatcatcagagtgaacaggcaacttacggaatgggagaaaatgtttgcaatctagatggcgattgcaatggcggttcgctgcatccatcagcccatcatctacattaggtatttctcctaatgctatccctccccttgctccccaccccctcacaggcccctgtgtgtgatgttcccctccctgtgtccatgtgttctcattgttcaactcccacttatgagtgagaacatgtggtgtttggttttctgttcttgtgttagtttgctgagaatgatggtttccagcttcatccatgttcctgcaaggacatgaactcatccttttttatggctgtatagtattccatggtatatatgtgccacattttctttatccagtctatcattggtggacatttgggttggttccaagtctttgctattgtgaacgctgcagcaatgaacatacataagcatatgtctttctagtcaaataagttataatcctttgggtatgtacccagtaatgggattgctgggtcaaatggtatttctggttctagattcttgaggaatcgccacactgtcttccacaatggttgaattaatttacactcccaccaacagtgtagaagcattcctatttctccacatccgctccagcatctgttgtttcctgactttttaatgatcaccattctaactggtgtgagatggtatctcattgtggttttgatttgcatttctctaatgactagtgatgatgagcttcttttcatgtttgttggctgcataaatgtcttcttttgagaagtgtctgttcatatcctttccccactttttgatggggttgtttttttcctgtaaatttgtttaagttccttgtagattttggatattagccctttgtcaggtggatagattgcaaacattttctcccattctgtaagttgcctgttcactctgatgatagtttcttttgctggatagaacatgttttatagagttgttgtgagaattaaatgcattaagcacatagaatagattctggtacatagcaagtgctctctctatatatggaactctatatgtagttggtgcaaaagtaattgtggttttcaccattgaaagtaatggcaaagaccatcattaccttttcaccaatttaaatatatggaaggaatatatatataaaacctatatatatatgtcacatatatgtctctaacccattattataatatataatacaatatatattataattataattgtatataacatatgttatataataatatagtaatatttattctaaataaatatataatactataaataatataataatttatatatatgattataatatataataggctatattatatattattaacatatacatatgtgtatatatatgtctttcatagacttaaatatatagagcaataataggttagaaaatagcaaacatgtatatataaacatatatacatatagaaaacatatataaaaacatatatatatatatatatatgtgtgttttctgcctttcatttttagagacagggtctcatcatgttgcccaggctggtctcaaactcctgggctcaagtgatcctactgctttggactcccgaagtgctgggatttcagacatgagacactgcacccagtccagtccctgtctttttaaatagactctctacctaagtgcacaaatactcattatttacatttagttatttctgtatatatgctataagcaaatcttgtagcaccagtttgatttttataaggcacaagaatatattttactaatgctttaaaatggcagctagattctagtattactttagaaattaaaattaatattttaacacatctttcattattgtgttatctgaaccaaacctattattgctgctatttcagcaaatccaggggctttttcttataaaatatgaagaatatagcttagatttctagtgaagatgttaccagtaataattaataaaatcagtaagcactaaaaggaaaataccaaaactaaagcattttgaattagtcattgaatctaaaagaaaggtagatttttttctgagattctgttctaggtgtggtatatgtgtatttttgcaaaaactataaacaattgtggcaaaatgaaggaaatatttaaaaacaaacctcttaattcttcagtggattaagcgtgaatatgtttttattttctatgatgaatatggaaaaattcatttccttagcaatttgtatgagcccaaaaactattgtcagactctgctgtatcaaaatagacaaaaaattgacactcacttttaccctgccaaaagcaaaatcttaaacttttgctttagtatataagccagcattcattgtatcctatgatgggttctgagtgtaggtgtatttgctttcttccattttttgtatgcatgttttctttttatttattattgtaagttgtatgaaatttttatccaaatttttattttcttctgattaataatcagaataatcagataattactggtaaatttgatgttaatccttccagctttttcccatgggaatttatacttaataaaggggagaagtcatcattacataatgtgcatattaatctgcttctccctttaatgtgttgtgaatgcctttccatgtcattagatgtttttctacctagttactttcatgaatcatatggctgtaccatgatttatttaatcagttcctcatcattgagtatgtaaattgcctccatttttttattactataaaaggtccttcagtacacacccctttaaaagctgactcttagaaggtgttcttgactctctacctaagtgtaaaaatacaaataaattgctttccagaaaaggtgcactactattttactttcctgatactaaactatgaaaattcagtcctaacaatagatatttaaataaagttttaaaaatgccaagtgaaaaagagcatattattattttcatttgcattacttttggttcctggtgagtttaatctgtttttgtatattaattatgcatttatatttctttttgtgtgtgtgaattgcctttcatgttctttgtgtgtttttattttgttgtatttgtctctttcttgatatatgagagaatattttccctagcctgtcaattgccttgtaattttgtttctagtgagtttttttttttttttttacaattaaaagctttaatttttgaaaattttgctggcaaatctatatatctttttctttgttttctgctttgacattattcttttataaaggcccatgccacccaaatattatgtaagcatgcatctatgtttttattacttcatcttttacatttaaatatctactctatttagaattcattgtgatgcatgtatgaggtagaaatctaatttcaaaaagatgagtatccagtttgtccatcatttattgcatgatctctttctccactgaattaaaatgccgtattttataatatattaaagtattacatgtgcttggacatgttcctggacttttgagataaatcagtctatttctttgtcatgtcacatattattatggctttatgatttaatatccagtaatgtaaaccctctgacacattattcttattcctcaaatgtttttgatgagttttcttccaaatgaaatttataatcattttattcattgattcaacaaatatttgttgaatggatattctgtgcttggtattgtgcatggtattaggattgttgcaaaaattgagactgacagtccctactcttacggtgctaaaaattcacttccaaaaaaatctttaaatgttgatgaagattgcactaatcttataaaataacttggaggggaatgtaatctttgcaacattaagttcttcattttagaaagttttaagactctccatttatttgagacttttaaaatatgtcccaataatgttttgtgagatgtatattttaagatatatatcttattgctattacattgtatcttttgttatattgttactatgaatgggatactcatttaattagatgtcatttttggtatatagaaatctattttcttagcatagtcattttttaaacctcgatctattaaattcttgattcatttacatttgttacacaatcatattctatgctgataatacttcttgcttctttccaatatttgtacctcgatcatttttcttgttgagttgtattagctagaagttctagaaaaatgttaaatggtagtaatagctagtattctgttttttcctgactctaaatgtaatgcatctagacttttataattatggcattgattgtaacattttgaggaagaaatcctttttcaggttaataatgtatctttatattcaagtttattaagaacatttattggaaacatattgaaattttatcagattccttttcagttgttactgagataatcataggttcttctgtattcttttaattaatttctcaaaattaaactgtcctattattcttggaataacgacatataaagtactgtatatttaaaagaagttaaaatgataatggtgattttattaagtgacctcacacaatagaaaacagtgtagccttagaagttttccaagtgaccattctacttagaaacaaccctgctttgggatcagaactgtaatttttaaagtaaagttttctgggtttaattcatttagtgtaattacaagcatgagttcaggtttctatttttttcacctgaactttccttcatggtttgaatatctagaaaaagcagactttcctatctctagactaaacatttgatcctatcttaggtatgcattacaattttttaaccataaatggttaaagaatttagactcatctacaataactttgaagctctggtcttgaagaacatgtgagaaatgagatataactcctagaagatataggagacatttttagtcttccaaattttccctgggaggctgatctaaattgagtcacaaaattgttcccaccaggaatgcaatcacttgagctgttttctaatctgagcccctctacccagatgatcttctgaactcatactgttcagactttcatccttctgagtagaaaacagccatagtcatggcaggatgagggctaggacaattacccaaggaattcttggcctctgccatgggactctgcagactcagatcatataatcagagatgttagcactggaggggacatcacaattagctttctccacctcttagtttatcagtgaggaaaactgtccagagcgcggaagagactaaaataacacagccaatgtaggtaatgtgctggataagaatttggaattcacgattttgaattcagtgtttatttcaccatcacgctggcttacacgttggtatcaggcttcttctattattgaagtgagccattaagtgaattccatcttgatttgtgtctgatacagagtaataaactattttattaaatatccaaataattatacattcctccttcttacatgcaagcctaagtttgcttgtactatttcatgtggtagcaaatcaggacgcttcttgtgtctctgaaaatactctgagtaatggagtacagtcagctttcttgtaccaagaatatagggactatgtttctcccagtcattctggggataatttttgtgaaggattgcacttcataggttaagctaggtatcagttaccagtgttttttccaaataaaaaaaaaatcaggtgatatctgtaaatggttccattgtaaatattaaagaacatgatgcttaaaacagattagggaaaactatagaaggggtggggtttcggagtgctaattttgtccttgaatggtaacagctccatgtggtggtgaggtttatgttggtttgctgtttgcagatgatcttattattagaatttttcataccgaaaataaactgcattttagtttgtaaacatgcccttccagagtaatgctaccagttctttgtgaaatagctactgttgttcaaaggatgactatgtcctcttcggttgaggaaagatgacaacaaactcagtaatgacatgtaaaataggtattacaaaccaggtatggtggcatgagcctgtaatcccagctacttgagaggctaaagcaggaggatctgttgatctatggatttgaggctgtagtgtgttgtgatggcacctatgaatagcccttgcactccagcccaagcaacaaagcaagactgtctctgaatttttgttttgttttgttttttgtttttttttttttgagacagagtcttgctctgtcacccaggctgaagtgcagtggcgcgatctccactcactgcaagctccgcctcctgggttcacgccattctcctgcctcagcctcccgagtagctaggactacaggcgcccgcctccacgcccagctaaattttttgtatttttagtagagacgaggtttcactgtgttagccaggacggtcttgatctcctgaccttgtgatcctcctgcctcggcctcccaaagtgctgggattacaggcgtgagccaccgcgcccggcccctgtctctgaattttttaaaaaggcattccactcaaattaatacacattttaattgtgttttgttgtaaattacaactgaataaaaattcagcaaataagtctgttgtggtagggaaaagtctattgtgatctggaaaatataatggagaaatccagtggaagagattttatttcacattactcaaaataaaaaaatcttatacaagtctttacacttgtaacttgaaaaattctgtgctaaaatttagcttggttgctaaaatatttctctttttttctcagaagcttctttttagcatcctatagacacaagttactttttaaaatatttgcatacttgctttgcaatgtattgtttatcagtagttctatattctttgagatagtctatccagtctttctgtatttatcgtatgtctgtatagatatatattagcagataaatgagttctgaaaggggagaaatgtgattatgctaatcatgatataaagaattgactttataagcagtgttcacaggtcatacctttcccgttactgtcttacagtgaacaagaaatgatgctttgtctggtatgcatggtaaataatgccccttgctctctgcttcatgatcacatgtgatacttctaacatagatagcacatgtaaatccagtggccttgactgcaactcaagagagcattttggccaagtacaaacccactagtcatgaaaaaaaaaaaaaaaccaaatcaaagtaaattgatggtattgacatttgtctatgaaaaacaacataatatagaacaattctggggtaaaatattgatctaaaataattttaaggattaaatattgccattgtaagcatactatgagcaattatgtttgtaatgcagatatatttataattttaaatccaagatttaccttaattgtacattttcctaatttaaaaaagttattttgaaaaaaaaatcctcgaatctagagaaaggttggcaaatacatatggaactttgtaaaaaacatccagggcagcactttcactgattgcagtagcttaggagtgaaaaacaacacaactgctccaatgtatggcaatgggcaaatatcccgatttattcacagggtggcatgttaggcagtgcttagaataaatgagttggttatacaagtatcaatagggataaatgtgaaaaacacagtgttaagtttttaaaaagttgtaaaaagcacagtaggatgttatttatataaaatttaaaaacctcaaaaaccattcttctttgatatatattctaaagatgaacatatatgtaatagaagtacaaaacatacataaaataatatacactatgcagtcatttgtgtacttacttttcaaaaatatttcagtagatatagcaaacagttaacatgtaatatttggataggaggttggcaattttctttttagcacctgcctgtctgctatcattcaaactcacatttaaaatgtggctatgtgagatgagagaactataatattccaggtttgtgattagtttggaaactttttaaaagtttgaatgtggtctgagagatagtttgttataatttctgttcttttacatttgctgaggagagctttacttccaactatgtggtcaattttggaataggtgtggtgtggtgctgaaaaaaatgtatattctgttgatttggggtggagagttctgtagatgtctattaggtctgcttggtgcagagctgagttcaattcctgggtatccttgttgactttctgtctcgttgatctgtctaatgttgacagtggggtgttaaagtctcccattattaatgtgtgggagtctaagtctctttgtaggtcactcaggacttgctttatgaatctgggtgctcctgtattgggtgcataaatatttaggatagttagctcctcttgttgaattgatccctttaccattatgtaatggccttctttgtctcttttgatctttgttggtttaaagtctgttttatcagagactaggattgcaacccctgcctttttttgttttccattggcttggtagatcttcctccatccttttattttgagcctatgtgtgtctctgcacgtgagatgggtttcctgaatacagcacactgatgggtcttgactctttatccaatttgccagtctgtgtcttttaattggagcatttagtccatttatatttaaagttaatattgttatgtgtgaatttgatcctgtcattatgatgttagctggtgattttgctcattagttgatgcagtttcttcctagtctcgatggtctttacattttggcatgattttgcagtggctggtactggttgttcctttccaggtttagcgcttccttcaggagctcttttagggcaggcctggtggtgacaaaatctctcagcatttgcttgtctataaagtattttatttctccttcacttatgaagcttagtttggctggatatctctcagaccacagtgcaatcaaactagaactcaggattaagaatctcactcaaagccgctcaactacatggaaactgaacaacctgctcctgaatgactactgggtacataacgaaatgaagacagaaataaagatgttctttgaaaccaacgagaacaaagacaccacataccagaatctctgggatgcattcaaagcagtgtgtagagggaaatttatagcactaaatgcctacaagagaaagcaggaaagatccaaaattgacaccctaacatcacaattaaaagaactagaaaagcaagagcaaacacattcaaaagctagcagaaggcaagaaataactaaaatcagagcagaactgaaggaaatagagacacaaaaaacccttcaaaaaatcaatgaatccaggagctggttttttgaaaggatcaacaaaattgatagaccgctagcaagactaataaagaaaaaaagagagaagaatcaaatagacacaataaaaaatgataaaggggatatcaccaccaatcccacagaaatacaaactaccatcagagaatactacaaacacctctacgcaaataaactagaaaatctagaagaaatggatacattcctcgacacatacactctcccaagactaaaccaggaagaagttgaatctctgaatagaccaataacaggctctgaaattgtggcaataatcaatagtttaccaaccaaaaagagtccaggaccagatggattcacagccgaattctaccagaggtacaaggaggaactggtaccattccttctgaaactattccaatcaatagaaaaagagggaatcctccctaactcattttatgaggccagcatcattctgataccaaagccgggcagagacacaaccaaaaaagagaattttagaccaatatccttgatgaacattgatgcaaaaatcctcaataaaatactggcaaaccgaatccagcagcacatcaaaaagcttatccaccatgatcaagtgggcttcatccctgggatgcaaggctggttcaatatacgcaaatcaataaatgtaatccagcatataaacagagccaaagacaaaaaccacatgattatctcaatagatgcagaaaaagcctttgacaaaattcaacaacccttcatgctaaaaactctcaataaattaggtattgatgggacgtatttcaaaataataagagctatctatgacaaacccacagccaatatcatactgaatgggcaaaaactggaagcattccctttgaaaactggcacaagacagggatgccctctctcaccgctcctattcaacatagtgttggaagttctggccagggcaatcaggcaggagaaggaaataaagggtattcaattaggaaaagaggaagtcaaattgtccctgtttgcagacgacatgattgtttatctagaaaaccccatcgtctcagcccaaaatctccttaagctgataagcaacttcagcaaagtctcaggatacaaaatcaatgtacaaaaatcacaagcattcttatacaccaacaacagacaaacagagagccaaatcatgagtgaactcccattcacaattgcttcaaagagaataaaatacctaggaatccaacttacaagggatgtgaaggacctcttcaaggagaactacaaaccactgctcaaggaaataaaagaggacacaaacaaatggaagaacattccatgctcatgggtaggaagaatcaatatcgtgaaaatggccatactgcccaaggtaatttacagattcaatgccatccccatcaagctaccaatgactttcttcatagaattggaaaaaactactttaaagttcatatggaaccaaaaaagagcccgcatcgccaagtcaatcgtaagccaaaagaacaaagctggaggcatcacgctacctgacttcaaactatactacaaggctacagtaaccaaaacagcatggtactggtaccaaaacagagatatagatcaatggaacagaacagagccctcagaaataacgccgcatatctacaactatctgatctttgacaaacctgagaaaaacaagcaatggggaaaggattccctatttaataaatggtgctgggaaaactggctagccatatgtagaaagctgaaactggatcccttccttacaccttatacaaaaatcaattcaagatggattaaagatttaaacgttagacctaaaaccataaaaaccctagaagaaaacctaggtattaccattcaggacataggcgtgggcaaggacttcatgtccaaaacaccaaaagcaatggcaacaaaagccaaaattgacaaatgggatctaattaaactaaagagcttctgcaaagcaaaagaaactaccatcagagtgaacaggcaacctacaacatgggagaaaattttcgcaacctactcatctgacaaagggctaatatccagaatctacaatgaactcaaacaaatttacaagaaaaaaacaaacaaccccatcaaaaagtgggcgaaggacatgaacagacactactcaaaagaagacatttatgcagccaaaaaacacatgaagaaatgctcatcatcactggccatcagagaaatgcaaatcaaaaccactatgagatatcatctcacaccagttagaatggcaatcattaaaaagtcaggaaacaacaggtgctggagaggatgtggagaaataggaacacttttacactgttggtgggactgtaaactagttcaaccattgtggaagtcagtgtggcgattcctcagggatctagaactagaaataccatttgacccagccatcccattactgggtatatacccaaaggactataaatcatgctgctataaagacacatgcacacgtatgtttattgcggcactattcacaataggaaagacttggaaccaacccaaatgtccaacaatgatagactggattaagaaaatgtggcacatatacaccatggaatactatacagccataaaaaatgatgagttcatgtcctttgtagagacatggatgaaattggaaaccatcattctcagtaaactatcgcaagaacaaaaaaccaaacaccgcatattctcactcataggtgggaattgaacaatgagatcacatggacacaggaaggggaatatcacactctggggactgtggtggggtcgggggaggggggagggatagcattgggagatatacctaatgctagatgacacgttagtgggtgcagcgcaccagcatggcacatgtatacatatgtaactaacctgcacaatgtgcacatgtaccctaaaacttagagtataaaaaaaaaaaaaaaaaaagtttgaatgttttcttgcattcagagccttggttgacatagttaattaaaaataaaacattgtatataaagcacagaatgagcagctacacaaagctgctcaatcaatgacagctctatatgggttagggtttcttgtggggatgacattgatgtagaaagcatggtcatctattgagaatgatggggctggaggtattggatacttgaggtttagaaaatacattgtagaaaatggacaaaaacccctcaaattaagggatgaggcagaataatgcttggcaataccaggggtaggctgcagtctttcttggaaatatatattttaaatggaaccaattatcatagcatcatttcctctcagggttaccctctgatccctattttactaaatcgttataaaacaaaatgaggaattatgtgtccttcccttttgaagccaatgtaacaagatgggtaagaattagacctcctgagttcaaaatccctggattcagatctattcctgtatattcaggagaagtggtaataaattcgatggacaatttggtttagtagtcgattgaggaccctgatgaggtatatttgggaaaacataacttccgctctctctcattgactcacgggcctttgaggagtccaggagtcattggaatctggcctgaggttgaggctgctggcaaaactccttccccaaagtccattcctattgctgactgagaagggactagcattggaagtggctgattttaaataccgctagtgctggtgtgctcctccctcccattcccagctctgctttgtgtagttgccttgagaagctaagttcattctgaaaataatgccattgcacaaaacacttttgaaagttctagtttgaaattacatcaggtcacttggtctgtgtggcctcagtttcttcatctgccatgtgaaaataataatgcctactctgtagcaaagaaagtctctatagtaaacaaaaaaaaagcctactctgatactgaaagttgttatgaaaaataaaaaagggaaatgctttagaaactgttaagtgctatgtagatgttactaattaacaaaccatttcagaaactatactttttattttatggccactattcactgtttaacttaaaatacctcatatgtaaacttgtctcccactgttgctataacaaatcccaagtcttatttcaaagtaccaagatattgaaaatagtgctaagagtttcacatatggtatgaccctctatataaactcattttaagtctcctctaaagatgaaaagtcttgtgttgaaattctcagggtattttatgagaaataaatgaaatttaatttctctgtttttccccttttgtaggaagtcaccaaagcagtacagcctctcttactgggaagaatcatagcttcctatgacccggataacaaggaggaacgctctatcgcgatttatctaggcataggcttatgccttctctttattgtgaggacactgctcctacacccagccatttttggccttcatcacattggaatgcagatgagaatagctatgtttagtttgatttataagaaggtaatacttccttgcacaggccccatggcacatatattctgtatcgtacatgttttaatgtcataaattaggtagtgagctggtacaagtaagggataaatgctgaaattaatttaatatgcctattaaataaatggcaggaataattaatgctcttaattatccttgataatttaattgacttaaactgataattattgagtatcttctgtaaactgcctctgttgtagttttttttttctcctaatcatgttatcatttttttggaatccatggtttcctgttaagatgactcacacagcctacataaaagtaattgacaaaatatcatcttatagtaaaatgccacatatctttatgttcagcaagaagagtataatatatgattgttaatgataacccaaacaacaaaagatttcaccttaactggttgtcataagtagtagtatccaccgccttattttgagttggatttttatcatcctatgagccctacaaatttaaagtttttggaacagcacgtgcattgaacccataagaacctactctgcttttctgcatgtattgtccagacaagagaccaaattgccgaggcatcatttaggtgaattctaattaacatttagctaccttacaaccacaattcaaggttgtttcaaaggcatgtgcttgcatcatcctgattcactaccatgtgttactaacttggatctgcaaagtcattataaaaagctgttttgatggacttatttggatattgctttacccttcttctctcttttcttttatcaatgtaaaaacattatatgttaaatacttggcttttaagagcatagatctgaaatctgcctctagcaaataacccataacacttctaagatatacctgcaaggtcaattgtgttgtaaaaccttgataaccatactttattgttcaaaaaagccttttatgaaggcagaagttaaaaaaaaaaaacaaaaaaaacagagtccacagttatcacctcagctacaatctcatcagttcacaagtaccagcaaaacatgtgataagtcaacaaatgttttatttcaatctgaacattttacgtaagtgaagactttgttagatatcatttggaatgtggaatctacacagttggcatatcagagaaggttgaattcagtttaataaatgtttatagaaagtgcttgttatcataatgataatagctcaggatgtgcatgacaagcttttaagcgattgggtacactatctcatttgatcttctgcacaactattaatggtaggtactattatccctatcttatggataagtaaactaagatttaaaaagtacagaacatggtgtgaacactgcttcaaaatttctaaaataggtaaatcacgatctctaaactggagggttgtccaaccactagggacaatagagtactgatatttagtggtcagactgtaatgcgggaagagacaggcatgggctaaacgggtgtagagatcaaataaggggcaggttagtttgtaaacatgtccatatgtaacatttagcacaaatacaggatataggtgctttcagacccagctgcattgataaaaagttaggtggtattgtatctgtcttcctttctcaatgttgcatatctgtgttcttgcccagtttgcttcatctctctagccacacttattggcctacaatggcatcatcaccaaagaaggcaatcccatctccgtgtggctttggtttgctccctaaagtaaaccttgtgtttacttttcccaggtctcatgctttcccatatctgacctgttttgtcctcatggccaggatatgtgggacctttcctacaatgttccaaagtttgtaatagagctcttctctgctttgttccaaattctgcaacattttactttaaataatgaatttaaatacaaacaaacttgagctttgcctatacttttcaagaatgcagagataactaaattaataaaaatattcattgagtccttactgtgcacacagctctatgttaagccttgtgcagaactcaaagtcactcgagattaagcctgttactaagttatgtgcaatttagctcagtggatttcccccacttcatattgctctgataatgttttggaattaactgccttgattccttcttttctctgcttgtctatacactatttattattctacaccatctcaaattctaactcctcaagaaaatccttccagatgatttttctaaccaggagttttaacttccttttaactaccctattactttctacttccttaactcatctatcatattatatttagttatttatatactaggtcgccttgaagaagggattgtgttttcataaatcttaataatccctgaggcatcaagtacagtgatttgcatttactaaatgctcaacaaatatgtgagggattcacttgaaactaatattagataattcccagtcaaagtgatctaatagcaaatcaattcttcagttttataggcaaagtatgactctggttttccataatcataattaatttgtcaactttataattttaattaagtaaatttaattggtagataaataagtagataaaaaataatttacctgcttaactacgtttcatatagcattgcatttttctttgtaaaatttaagaattttgtattaataaacttttttacaaaagtattaattattcagttattcatcatatacttttattgacttaaaagtaattttattcaaaagagttagtataggactacatgaaaaattcaaggccaaggcttaatttcaaatttcactgcctttggctctatcttttaaaacaaaacaaaaaactcccgcacaatatcaatgggtatttaagtataatatcattctcattgtgaggagaaaaaataattatttctgcctagatgctgggaaataaaacaactagaagcatgccagtataatattgactgttgaaagaaacatttatgaacctgagaagatagtaagctagatgaatagaatataattttcattacctttacttaataatgaatgcataataactgaattagtcatattataattttacttataatatatttgtattttgtttgttgaaattatctaactttccatttttcttttagactttaaagctgtcaagccgtgttctagataaaataagtattggacaacttgttagtctcctttccaacaacctgaacaaatttgatgaagtatgtacctattgatttaatcttttaggcactattgttataaattatacaactggaaaggcggagttttcctgggtcagataatagtaattagtggttaagtcttgctcagctctagcttccctattctggaaactaagaaaggtcaattgtatagcagagcaccattctggggtctggtagaaccacccaactcaaaggcaccttagcctgttgttaataagatttttcaaaacttaattcttatcagaccttgcttctttttaaaactttaaatctgttatgtactttggccagatatgatacctgagcaattcttgttctgggttgtcttatgtgaaaaataaattcaaggtccttgggacagataatgtgttttatttatctttgcatatccattacttaaaacagcattggacccacagctggtacaaaattaattactgttgaattgagcaaatatttattctaaatgtctctgtcaaatgacagagtgtggttgtgtggattaagtccctggagagagttctttgttctctcatgttctatgctgtggttcttgctttatgcaaaaagaagtaagttacttaaaacctggacatgatacttaagatgtccaatcttgattccactgaataaaaatatgcttaaaaatgcactgacttgaaatttgttttttgggaaaaccgattctatgtgtagaatgtttaagcacattgctatgtgctccatgtaatgattacctagattttagtgtgctcagaaccacgaagtgtttgatcatataagctccttttacttgctttctttcatatatgattgttagtttctaggggtggaagatacaatgacacctgtttttgctgtgcttttattttccagggacttgcattggcacatttcgtgtggatcgctcctttgcaagtggcactcctcatggggctaatctgggagttgttacaggcgtctgccttctgtggacttggtttcctgatagtccttgccctttttcaggctgggctagggagaatgatgatgaagtacaggtagcaacctattttcataacttgaaagttttaaaaattatgttttcaaaaagcccactttagtaaaaccaggactgctctatgcatagaacagtgatcttcagtgtcattaaattttttttttttttttttttttgagacagagtctagatctgtcacccaggctggagtgcagtggcacgatcttggctcactgcactgcaacttctgcctcccaggctcaagcaattctcctgcctcagcctccggagtagctgggattagaggcgcatgccaccacacccagctaatttttgtattttagtagagacagggtttcaccaggttgcccaggctggtctcgaatgcctgacctcaggtgatccgcccacctcggcctcccaaagtactgatattacaggcatgagctaccgcgcccggcctaaaaaatactttttaagatggtgtaaatattactttctgtatcaatggtacattttttacttgtcagtctctagaatttctttataaatatgttgattcagttcatttttgtagattataaaacaggtaaaaaaggataaaacatttatgtgaattaaagggaatacctaatttttgtgtagagtttattagcttttactactctggtttatggatcatcacaccagagccttagttactttgtgttacagaataactaatatgagtgaatgaatgacttacacaagtcactgcttaggataaagggcttgagtttgtcagctagagtatgacagaaagtatctaagttttggagtcaaatagcactttgtttgaatcccagattgcatgcttactagttatgtgaccttagtcaagccacttcacctcactgagtctttgcttttttcatctctaaaatagagatacccaccgctcataggctgtcataagggatagagatagcatatggaatgagtctgtacagcgtctggcacataggaggcatttaccaaacagtagttattatttttgttaccatctatttgataataaaataatgcccatctgttgaataaaagaaatatgacttaaaaccttgagcagttcttaatagataatttgacttgtttttactattagattgattgattgattgattgattgatttacagagatcagagagctgggaagatcagtgaaagacttgtgattacctcagaaatgattgaaaatatccaatctgttaaggcatactgctgggaagaagcaatggaaaaaatgattgaaaacttaagacagtaagttgttccaataatttcaatattgttagtaattctgtccttaattttttaaaaatatgtttatcatggtagacttccacctcatatttgatgtttgtgacaatcaaatgattgcatttaagttctgtcaatattcatgcattagttgcacaaattcactttcatgggctgtagttttatgtagttggtccagggtgttattttatgctgcaagtatattatactgatacgttattaaagaatttcctacatatgttcactgctgctcaatacatttatttcgttaaaacaattatcaagatactgaaggctgattggtaactcacatggaactgggagagtatacaattctgaaccaaatagatgattctctattattatatcttaatttatgtgttatggtatattaaacatgaaaaaaattgtatttggttagaatatgtttgctcttccttaactcgggaatgacatagggtaatattcacagattgggttcctataaatcctccacttgaagtgaagtcagttcaagtaatgaaagctacctcctgagatagaatcagtacttggcacctatctctagtgttctttcacctcatataacctttcactgattagtaaagattatatccaacaaagaaagtacagcacagactgagatatgattactgagataaatttgggcaaaatataaactacagcatttctgtagcaatgagaccatttttcttcagttgagctccatgttctacaaacttcaatcaaaaaaggttctaggagactcagtgaaagttgatacactgttcaaggaacaaataatttcagcacatgggaatttcacagggaaaaatatactaaaaagagaggtaccattttggatggtgtcaatatgggttatgaggaattcaggctgctgagtccagtgtacaatggaaactgagctgcaggtgtgtgattgtaacaacaaaagaaatgctgaaatattaagtcctttgccatgtaaatagaaaaagagtatttatttcccaaacattattgctcacctgtttttgttatgcctttcaagataaatccaggaaaggaattgcattttctttccagaaaacaagttcttgggggaattgttcaattggtagatgttgtttttctcattaacaagtgagtgctccatcacacttgctgagtgctccatcacacttgctctctgcattactcctctgcctgcaaacacatatatagcaagggtgatgacaaggatatcagagggtctggttttctcaaactcatgataaactcatggctgggtcattcttggtgctgattttactttgttttttgttgttattgttccctcttcctcaaaagatgaaatctatccctcttacttggaatttctctttgatatatagcgaatgtttggttgtaacctgtataatctggcatgaaattgtcactcgaaaaggctagaagtgttgacataaatatgggacagcaagagttgctcctactcaagagagcaaatataatgttctggaagagattggcagaattcacatcaaaggagtgattacttcagcctgggccactgttgtactggtcaaaaggctgtgcaaagctctctgaaaatccactcttttattgctctttagtaataaagtcactttcaattttaaaaataacaaactgatatatttttatgactcataaaatgttagcaattatattatggagaatctactttctgggtgattcttacaaatgttcttggatctatttttttttcttatagtacctattcttcccatttttctcagctctagttaatatatttcaacaacagttcaacaaatttaacatttttataaaaagtgtttcctatcattttataaataccagcctagtccatgttattccttttcttgttgaggagaaaggacacacattgtaaattcaaatatagacctctactgtgctatttaatcttggtaacaactccacaaaggagatgacatgttttccttctatagaggtagattctgtaaagttagagggaagagtgacttgcttaagatggcataagctgtaactggcagaaccaggattcaaagccaggtgggatgccaaaatcataatctgtcttcagtgtcaagttactgaaattggtaaacattagacctaaatagacggaattgcaatccgggttgggcacattaaactccattttcttcatcaatgtgctcagattacattttacttttcaggctaaaaatggaaaaaaagagtccctcttagttctgcacttgagaatgagaatagcttttctgaattatacaaggaagaagaactaatgcccaaatgccaggtacccacatgcactatgccatggcacagctgttgccccctttcaccagagccctctctctgtatcctggttgacctttccttgggcaagagctgggtggggaggatcacaagtgactccaatttggatggcttcgggaagactgggaccgagctgaaggcagtgttgtcctctgcactccctgttttctgtctgctggagcactgaagcctcacatatgtattaaaaaaataatttccatttgcatttcagactagaagattgaacgtatagtgtaatgtgattgcaaataattatattgaaatgagacagagaggatgtagtatctactgtcataatttttcaaaacccacctgcaacttgaattaaaagaaccacttgggtttttttttttgtttcaaacgcaaatcctggaaacctactgagactcattcagtcagtatctctaagaggcaagcttgagactgtatatttaaaaagcatctcaggtgatttttacacatgctaaggcttaagaaccacttctctgtagcttatatgttattttcaatgttcctcaaagccaagttagaatttccaaagtgttaagaatccattagacaatcacagaattgtctttttcctttataaatcttgcaatgttgttctcatttccatacttaattacttaaaacaccaaccaaccaacaagcaaaaaatgattagtctaactaatattacaagttaataatgaagtaaaggtttaaaaataatgtcataataatgttaataacaaattattaattataatttaaaaataatatttataatttaaaaataatatttacaagtactacaagcaaaacactggtactttcattgttatcttttcatataaggtaactgaggcccagagagattaaataacatgcccaaggtcacacaggtcatatgatgtggagccaggttaaaaatataggcagaaagactctagagaccatgctcagatcttccattccaagatccctgatatttgaaaaataaaataacatcctgaattttattgttattgttttttatagaacagaactgaaactgactcggaaggcagcctatgtgagatacttcaatagctcagccttcttcttctcagggttctttgtggtgtttttatctgtgcttccctatgcactaatcaaaggaatcatcctccggaaaatattcaccaccatctcattctgcattgttctgcgcatggcggtcactcggcaatttccctgggctgtacaaacatggtatgactctcttggagcaataaacaaaatacaggtaatgtaccataatgctgcattatatactatgatttaaataatcagtcaatagatcagttctaatgaactttgcaaaaatgtgcgaaaagatagaaaaagaaatttccttcactaggaagttataaaagttgccagctaatactaggaatgttcaccttaaacttttcctagcatttctctggacagtatgatggatgagagtggcattttatgccaaattaccttaaaatcccaataatactgatgtagctagcagctttgagaaattctaaagttttcaagtgataagactcaatttatacaaagctaattggataaacttgtatatgattaagaagcaaataaatacttattatgcttttttgctgtttatttaaatatttaacccagaaaataagtcactgtgacagaaataaaaatgagagagaagggtgagccactcttaggtagttctggcattatttaatctaggccagaggttgcaaatggtgtcccatagaactaattttggctcctagacctgtcttatttaacctttcatttaaaaaatttgtattggttgccagcaattaaaaattgggagatgtctcacacacacacacacataaacacacacactcatgtgtgcagcctcttttgaagaattggaataactagtcaactgcgtcctccttttccacaagctgtgacagctccctgctcacagagcacctgccctctcctgttcatcatgctctcttctcagtcccattccttcattatatcacctatttggtcctgagactaagtgagtttgagatctgtgatttagacaaagtggtgaatctagctctgaatcatagtaagtagctctgggaatcatcttgtcttctgttagcccattgagagagaaatagagagagagagagagagaaagaaagaagaagaaacagatctggggagagtcactgaatgggagcatagagacagagaaacagatctagaaaaccaaactgggagaaaatgagagaaaccaaaagagaggtagagaggagcagagaagaaaatgaagaagcaaggcaaggaccaggctttttcattatttcttatggccaagacttcagtatgcgtggacttaattcttccttatgctcctaccttccctagggaaactgatttggagtctctaatagagcccttcttttagaatcacagtttgatgccttaaaactagttatataccttcacatgcttccttaacccacagaagtgatgctaatgaggcccttaataaggagcgtgctattaagatgaagacattcattttttttctccgtccaatgttggattaaggcacattagtgggtaattcagggttgctttgtaaattcatcactaaggttagcatgtaatagtacaaggaagaatcagttgtatgttaaatctaatgtataaaaagttttataaaatatcatatgtttagagagtatatttcaaatatgatgaatcctagtgcttggcaaattaactttagaacactaataaaattattttattaagaaataattactatttcattattaaaattcatatataagatgtagcacaatgagagtataaagtagatgtaataatgcattaatgctattctgattctataatatgtttttgctctcttttataaataggatttcttacaaaagcaagaatataagacattggaatataacttaacgactacagaagtagtgatggagaatgtaacagccttctgggaggaggtcagaatttttaaaaaattgtttgctctaaacacctaactgttttcttctttgtgaatatggatttcatcctaatggcgaataaaattagaatgatgatataactggtagaactggaaggaggatcactcacttattttctagattaagaagtagaggaatggccaggtgctcatggttgtaatcccagcactttgggagaccaaggcgggtggatcacctgaggtcaggagttcaagaccagcctggccaacatggtaaaacccggtctctactaaaaatacaaaaaattaactgggcatggtggcagatgctgtagtcccagctgctcgggaggctgaggcaggagaatcacttgaacctgggaggcggaggttgcagtgagctaagatcacgccactgcactccagcctgggcaacaaggcgagactctgtctgaaaaagaaaaaaaaataaaaataaaaataaaaagaagtggaggaatattaaatgcaatataaaagctttttttatttttaagtcatacaatttgtttcacataacagatcaggaaataatacagagatcataagttttggagctgggtttgaatcctggctctgccatttactttctgtgtaatctaagtcaagttactgaactttgtgggccctctggctctccatgtgtaaaatggagaatattaatatttaccttgcaagtttgttgtgaagactgaaggagagaatttaggtaaaacattcatcagagtaccatgcacacagttgttcctcaataaacattagcttctctgattgcaagttccagtctaaagtgctttatatataccagccaataaaaggatgcgagagagatataccagtgtattgttttctaccattttaaacctattttcatccactgttacaaattctatcatactgctccacataaaaaatattatcaatgatttttagtctctgaagtgcaatatttgattattgagcacacctgttgaagttttagtttcttctcacttacatgggttgtgtaaaggtaggaggtataaaaccagtgtcctaggtctaaatctttcttaatgtcatactttggattcattgatataagtaacttgagcaccagcgcttcattttacttcattttttaaagatatagtaagagtaattcccatctgcctagcaaaattgttttgtagaaaagtttgtggatcagatttattttactttgattttaggaatttcaagtgtcttcgtcggcatgaaggaaaaatatgcagtttgacattttctactactttcaggtcattattttcctactctggtgcaaaaaccctcaattcctgtctcactccatctaatcaaataggtagcatgcttgagcccttactatgtgccaggcactaggataagcactttatatgttttgtcccaattaattctcacagcatttctatgacctaaataaaattaatattttcatttcaccaataataaaatggaggcttcaaaaagtttagggacttggctcagctcacacaactggcaaggactgaaaatggattttagtcccaaatgtcataggctagagccctttcactaaactgttgtcttccatctggtggcatcctcttcctccagtctttgtcacctaaactctgggcaccccttgatggcatttacttatgatggtgatgcttgttaaacttcctgtttgcgacttcaacgtccatataaatgagtcttccaatactgtacttagaacttatattttgtagtgacttctttaaaagctttctctcttagtcatatcctgagttttgttagcacctggacttaccttactttggaaatgttgcactctgaaatctctttctcagcttggaatttcctaatcttccaactgtttgagtcttttaattctacatttactgcctttccatttcatcaggatttctagtctctttaattcttccttttgaactcctcctgatttaacctctgcttattcgaagaacaataattttattctctcagctgcactctcaattcccttttccttttggtgatttttctttttcctacagaacacttactttatcagttttggagaaggaagtgctatctgggtaacagtagtgctatctgttgactctagtcaactgtaagttttatacatttattgtttaaaccttatatgggtctataatccttcttgggaaatcctttcatttgtctttaatttcctttaccatttccctaaaggctattccagatttttatcacattcacaaaattcccgtcttttctcaggatctgttcacccccagtagatagccttgtctcccacaatacatggagaaaatagaggccaccgtcatatttgaatgtttccaacttctctcttcacctttggaattatctttttcttcttttgtgtctaagagaaagatgtatacttcttcttacccttgtctgaactactctattttgcttcatcttctcagaacaggggaccagcaattattcttcctccagaagcttcaacatcttttgtcaactgactccttctcatgtttaaatattttcaagttaaacaatttctttcctgactttcgctcacgcaacctcatgcccaaaaccttatcactcttcttccctttgctgtcaaggctgttctcacttcttcactttttgtggacttctccccactacaacatagattctgctatcaccaatctattaaaactgttatactcttgtggaatttatcatttaatttagcttcagtgaaccgttctttccagattattttggcctcagaccatgacttctaagtctgccgtgcttgccacttaagtgatgatgggccagtgggtccccacctaggcctctgtgttagtctgttttcatgttgctgataaagacatacccaagaatgggcaatttacagaagaaaggggtttgagggactcacagttccatgtgactggggaggcctcacaatcatggtggatgatgaaaggcatgtctcacatggaggcagataagagcatagaacttgtgcagggaaacttccctttattaaaccaccaggtcttgtgagacttcttcactatcacgagaataggatgggcaagaccctcccccatgattcaattatctcccactgggtccctcccacaacacatgggaattatgggagctataattcaagatgagatttgggtgaggacatagccaaaccatatcagcctccttctggctttttatgttctccgtgggtgacctctctcaggctcaagtgataaccaatgtgctgatgactctcaaatgcgcatctctggcttcagtttcttccttgaacttcatacatatgtttccaaatttcctgcgtgtacctcaaggttcttgttcatcacttcccaagcttcataaacgcactcattttagtgtattctctgtctcctttgatagcatccctgagaggcaagtccctggtgagttatatacaactcctcccttgctccaaacctgagagtaagtaacattcctattaacatattaggaagctgaggcttagacagtttaagtaactcaagcatggttacacaactagctagggcagagctaaaatgtcaggctaggcttctgtgactccaaagccctttctcacttagcatatcatcacttatttttttttttaatcacatatatgatttttttttctttaagagatagaatcttgctctatcacgtgggctggagtgcagtggcacaatcatagctcactgtaaccttgaacttgggctcaagtgatcctcctgccttagcctactgagtagctagggctacagacacacaccaccatgcctagctaattttattttattttattttattttttgagacagagtctcactctgtcacccaggctggagtgcagtggtgcgatcttggctcactggaacctctgctgcccgggttcaagcgattctcctgcctcagcctcctgagtagctgggattacaggtgcctgccactgtgcccagctaatttttgtatttttagtagagacggggtttcaccatcttggccaggcttgtcttgaactcctgacctcgtgatccactcgcctcggcctcccaaagtgctgggattacaggtgtgagccaccacgcctggccacctacctaatttttaatttttttgtagagacagggtctcactacgttgcccaggctggtcttgaactcctgttctcaaacaatcctcctgcctcggacaccccaagtgcagggattacaggcatgagtcattgcagctgacctgtatatatgatttttagtatatgtaaatatacatatttattaaatgtaaatataaatataaatgtgtggagtgatatccattgaaatgttaaacatagttctcagtggtacaactacaggtgatttctcttttcttatttctggttttctgtgttttccaaatttcttgaaatgtgtcttctgtaatcagaaataaaagttattagtaacaacagtcttccactggtacaagtgcttattggataaaagtcccacttctaagcatgatactcacaacttttaggttaatagcctttgtcaccttgccatatacatctgatccagccactcacaccattcctgagatatattttgttcctttgtgcctaaatcattgtgcatgcagatccatcttcctggaacacctataaccatttcttagtcctgtgaaatcctacttacatccttcatagcctagcatgtatgtcatttatttggtcaagggtgagttggttgttctcttgaatgtactgccatatgacgtggtgtgatttcaattgtagcaccaagctcattgcaatattaattcgtttgtcattctcccatgtaggatgtttgaagtagtttctaacacagagattatactcaataaatatttattagataaataaatgaataagggaataacaaatgcctttgtctcattttaaaatactttcattgttagctacccatataataaaaaactaaaagcagtagttttcaagcatgattgtttatgtatgccttaaaagaattttgaaaacctatgtacccctgacacacttttaagttaacttataaatttttcaacatagttttaagtggtggcaaatgatgtagtttcttgtgtattttaaactgcttaagtatgctatacatggatttcttcaaaaccctgaagctgcagtttcagtgcattcaatttatggaaaagaaattaatttataaaattggttcttattgtcaagtcaatcagctaaatataacttgctttctgtcaggaaaagtctgactttaaaatacagataagtaataactattattaattaattaaattattaaaattaaaataattaaataatttgttaattaaaatgccttattcccctacttatttctgcaatttgactctaagaatagataggacatgtagattgccttaggtttgaaatctgggtgaaataagatactgcctccttcagtatttctgcctttgcttttatgggagcctctttcaagaaaaagtcattctctcatggtccctttgtttgagtcccagaggttttcctactccagaaagtgcaacgtagtgagactagtactatactcccttgcatggtaagtgagaaggctgtctgtataaaatgagggaaggactcatgagagggaagtaggtcaggagaaatgataggttctcaggcaggttaattttaggaaagagtgaatagagtcccttaaaacaaggtgcatctgcttcctcctgatcaatctttaggactgtttactttgatttgaagaccactatgctaaagcttcccacgggggcaatagtgaggcaaggaatttttaaaagggaattacttcttcgtagctacttttgtgaaatgaattcatttgaattatctggcaatctcttcatatttatattcaacaataattacttaaagaaatgctttgagcttctcagaggagggtgctaccagtgtgatggagtagaattcagatttgggtagtgactttaaagctgtgtgactttagtcatttaactgctgagtcacagtctacagctttgaaagaggaggattataaaatctatctcatgttaatgctgaagattaaataatagtgtttatgtaccccgcttataggagaagagggtgtgtgtgtgtgtgtgtgtgtgtgtgtgtgtatgtgtatgtatacatgtatgtattcagtctttactgaaattaaaaaatctttaacttgataatgggcaaatatcttagttttagatcatgtcctctagaaaccgtatgctatataattatgtactataaagtaataatgtatacagtgtaatggatcatgggccatgtgcttttcaaactaattgtacataaaacaagcatctattgaaaatatctgacaaactcatcttttatttttgatgtgtgtgtgtgtgtgtgtgtgtttttttaacagggatttggggaattatttgagaaagcaaaacaaaacaataacaatagaaaaacttctaatggtgatgacagcctcttcttcagtaatttctcacttcttggtactcctgtcctgaaagatattaatttcaagatagaaagaggacagttgttggcggttgctggatccactggagcaggcaaggtagttcttttgttcttcactattaagaacttaatttggtgtccatgtctctttttttttctagtttgtagtgctggaaggtatttttggagaaattcttacatgagcattaggagaatgtatgggtgtagtgtcttgtataatagaaattgttccactgataatttactctagttttttatttcctcatattattttcagtggctttttcttccacatctttatattttgcaccacattcaacactgtatcttgcacatggcgagcattcaataactttattgaataaacaaatcatccattttatccattcttaaccagaacagacattttttcagagctggtccaggaaaatcatgacttacattttgccttagtaaccacataaacaaaaggtctccatttttgttaacattacaattttcagaatagatttagatttgcttatgatatattataaggaaaaattatttagtgggatagttttttgaggaaatacataggaatgttaatttattcagtggtcatcctcttctccatatcccaccctaagaacaacttaacctggcatatttggagatacatctgaaaaaatagtagattagaaagaaaaaacagcaaaaggaccaaaactttattgtcaggagaagactttgtagtgatcttcaagaatataacccattgtgtagataatggtaaaaacttgctctcttttaactattgaggaaataaatttaaagacatgaaagaatcaaattagagatgagaaagagctttctagtattagaatgggctaaagggcaataggtatttgcttcagaagtctataaaatggttccttgttcccatttgattgtcattttagctgtggtactttgtagaaatgtgagaaaaagtttagtggtctcttgaagcttttcaaaatactttctagaattataccgaataatctaagacaaacagaaaaagaaagagaggaaggaagaaagaaggaaatgaggaagaaaggaagtaggaggaaggaaggaaggaaagaaggaaggaagtaagagggaagcagtgctgctgctgtaggtaaaaatgttaatgaaaatagaaattaagaaagactcctgaaaggcaattatttatcaatatctaagatgaggagaaccatattttgaagaattgaatatgagacttgggaaacaaaatgccacaaaaaatttccactcaataaatttggtgtcaggctgggtgcagtggctcacacttgtaatcctagcacttttggaggcagaggcaggtgaattgcttgagtccaggagtttgagaccagcgtgggcaacatggcaaaccccacctctacaaaaaacacaaacaaaagaaaatagctgggtgtggtggtgtgtgcctgtagtcccagctacttgggaggctgaggtgggaggatcacctgagcctgagaagtggaggctgcagtgagccatgattgcaccactgtaccctagcctaggtgataggctcaaaaaaaaaaaaaattggtgtttgcaatgctaataatacaatttggttgtttctctctccagttgttttcctacatacgaaacagcttttaaaacaaaatagctggaattgtgcattttttcttacaaaaacattttctttcttaaaatgttattatttttcttttatatcttgtatattattactagcagtgttcactattaaaaaattatactataggaggggctgatactaaataagttagcaatggtctaaacaaggatgtttatttatgaaaaggtagtaattgtgtttcatagaatttttaaaattaattctgcgtatgtcttcaagatcaattctatgatagatgtgcaaaaatagctttggaattacaaattccaagacttactggcaattaaatttcaggcagttttattaaaattgatgagcagataattactggctgacagtgcagttatagcttatgaaaagcagctatgaaggcagagttagaggaaggcagtggtcccttgggaatatttaaacacttctgagaaacggagtttactaactcaatctaggaggctgccttttagtagtattaggaatggaacactttatagttttttttggacaaaagatctagctaaaatataagattgaataattgaaaatattaacattttaagttaaatcttacccactcaatacaatttggtaatttgtatcagaagcttaaaagataacctaatagttcttctacttctataacttacccaaatatgtttgcagagatcttatgtaaagctcttcattataacactgctttcaggagccaaaaattgggtgggggagccccataaatgttgaataataggggtttgattagataaattttggtgtagttctataatggcgtgttattcagccaataaaaggtttgttaaagaatgactgtgacggatgtatatgatatactcttaagtgaataaagagttacaaaatgttatgtacaagttacaaaatgtatgtacattatgatccatttttcataaaatcatatgtatgtatatatgtgtgtctggaaggataaatttatcaagttgttatctctgaaattttgggtatattttatatttctagattttctgttactttgttactttactgataaagtaataacgttgttgacttttgtcactctcccctattaataatcatctaggctgcaaaaggatcatgtcttctttatttttatattccaaggactgtcaacaagtgcctagcacttgacaggtatattatagaaatttaactgaatatctttaggaaatagatttttgtttgtagttgttctagtctacattaaatgtcttgcgcttatgaaacttccttgaattattttagtgaagcaatattagtatagaattttgcatcactggatgcccttgactgaaagctggcttatggcatctcaccagtgtgtggggagtttcagtccttctgttgtctgcatcacagctgaagcagtgctgttgctgacaattcctgacaccaccttgtctctattattgatcattgcctcactatggtactgagttttagcttattcttgtaataactgggactcatatgtatagaataagctattagctcacgtttttgcttgctttttatacagaatacatgtctgcaaatagttttatcaatattttggaattttgggagatatgaagttaaaaacatcattgaatatatatatatacacacacacatatatatatgacactatacatgatttattttatttaatttttaaaattttattctttttagagattaggtcttactctgtcacccaggctgaacttcagtggtgtgatcatagctcactgtaaccttgaactcctgggctcaattgacctttccgcttcagcctcccaaagtgctgggtttataggcatgagccactgtgtctggtccaatatgcatatatatatttttaacctggattatcagagctatattgtgtttaggtttataaagctgtactatgtgaaaatatcacttctaggtttaattttgtacaaaggaattttatatagaaatgaggtaattcagattttttcccatgtaataagaattgtaaaatttactgaaacaaacatcaaaaagatatctgttacatgaccttcctttcttttgaatatatttcaggtgatattatttattaaaatttaaaaatgaaaattaaaatatataaaaagttgaaaattattcctttctttactgtctctcatctgtccattttccattctcctgcattccctcatccaaccaaggtagccaatccaggtaactttttttagtatcttcccagagatgtttctctctatatatataatcaatatacattttttattattccccacctctctttttatgtaacaatatgcagagttttgcttcttgcttttcccactatcttggacaactttccatattcaaagcacagaggacttgcacatatgttcagactgctgaatatttctgtctctcccctgccattcatatgttgaaatcctaattcccaaggtgatggtattgcagggtggggcctttgggaggtgattagtccatgagggtgaagtctttagtaaatgagattagtgtctttataaaagaaaccttagagagaccctcacaccttagagagaccctcacccctttctgccatgtgagaacacagcaggaagacagctggctatccaggattcaggagtctcttagcagacccaaatctgctggcaccttgatcttggacttcccagcctccagaactgtgagaaataaattcctgttgtttataagccacacagttcatggtattttgttatagcagcctgaacaaggacacacacacacacacacacacatgcacacacatttaaatagatgcatagtattctatcatatggatggatattctatgatataatgaatcactattgattgacatttgggttgtttccaatattttgttaacacaaagaacaacactacaaataactttatatacatatcatttagcacatctgcaattgtatcagtaggcttcctataagtggtcaagcatttgtgtacttgtgattttggtagatgttgtcaaatgtccttccctgaaatttgtaccaattcgtactcatgccatacactctaaatagagtgctgatttccccacagcattactaacagatgatattatctaatttaaaaagtttctcatcttatagggaaaatagtatgtcaatgtattcttaacttgcatttcttttattataagtagtgtaaaatatcatttcaacttatacacaggaggaatttctctctatataaagtgatcctagaatcataatgaaaaatatcaccaactcattaggaaaatgtacaaaggattgaatagatatctcatcaaaaataaaaatataagtggcctttaaacattgaaaggtaacatttgaacaaagacttgcaggaggtgagggattagggaatgcagactctgggaagagtcttccaagtagcaggtgaagcaagtgcaaagctttcagatgggactgactatacctgtctggtttgaagaacagtaaggaggtcactgaggctggcatagagtaagacagggagggtagaatactgtcagagaagtaatcggcggtggaggtagggggtaaaccataaagtgctcgtaaagactaaggcttatttctctgggtgagattagaggccactggagagttttaaacagaagtaacagggccactttggctaatgtttttaggctattctgtagggagacaagggaggaagcaaggagatgagttaggagtctattgtgccagttcaggcaagtgatgatggtggcttgatccaggtagtagtggaagtagtatagtaggaagtgatcagattcaggacatgctttgaaggaagatccaataggattaatggataagttgaacaatggcatatgagaaaagtcacagaggagtcaaagatgattccaagctttctggactgagtaactggaaggataaatgtgccgtttactagaaagataatgggagaaacaggttttggatggagcttggtttgggaatattaagtttgaaatgcctatttgacatccaaatagagatgttagttggatgtacaagtctagtttcaaggaagagggggctggtagtgtgaagatggggctggataagattctaaaggaaagagggttgataagaagagaaaggggtgtaggggttagcctaagggcattctaagtattagaggttaaggaggtgggtgaagaaaacccaataaaataaaagtctgagaagacaaagctagtgaatgaatgtggtatcccggaacccaactgatgtcaagcagaagggtgttatcaactaggtcaaatgctcattcatcaagtaagatgaaactgttataattaaccggtgtcttctgaaatacggagataactcgtgacttaatgaaagcaatagtagagaaggtcaaacttgaccagaatgaaattagaaagaataagaggaaagaaaagaccaaatacagacaaccattgatgccttattcttttgatatactcctggagtccacttgctaatacaattgacccttaaacaatacaggcttgaactgcatgggtccacttatttgtgaattttttttcagttaatacattggaaaatttttggggttttttgacaatttgaaaaaactcacaaactgtctagcctagaaataccgagaaaattaagaaaaagtaagatatgccatgaatgcataaaatatatgtagacactagcctattttatcatttgctactataaaatatacacaatctattataaaaagttaaaatttatcaaaacttaacacacactaacacctaccctacctggcaccattcacagtaaagagaaatgtaaataaacataaaaatgtagtattaaaccataatggcataaaactaattgtagtacatatggtactactgtaataatttggaagccacttcctgttgctattacggtaagctcaagcattgtggatagccatttaaaacaccacgtgatgctaatcatctccgtgtgagcagttctctctccagtaaattgcatattgcagtaaaaagtgatctctagtggttctcgcatatttttcatcatgtttagtgcaatgccataaaccttgaataacatcaagcaatccatacaaagtgccactagtgatgcacggaaaagttgtaacagtacaagaaaaaagttgagttgcttggtatttaccatatattgaggtctgcagctacagttgcctgcaatttcgagataaatgaacccagtataaagactgttgtaacaaaagaaaagaaaatgtgaaaccatcagtgcagctatgccagcaggtgtgaagtcttgcactttttgcaaaatacaaaatatgaaatatgtgttaattgactgtttatgttatctgtaaggtttccactcaacaataggctattagtagttaagtttttgtggagtcaaaaattatacgtggatttttgactatacagtgggttggcacccctaaccttcatgttgataaagggtcaatggtatattatttaatttttttgtatttatattcataaataagattaaatctatatttccaagtaatctctataagattttgttattaatattactattatttttgagacagagtcttactgtcaccaggctggagcacagtggtgcgatctcggctcactgcaacctctgcctcccgggctcaagcaattctcctgcctcaccctcccaagtagctgggactacaggcacgcacaaccacactcagctaatttttgtatttttagtagagacggggtttcaccatgttggccaggatggtattgatctcttgacctcatgatctgcctgcctcggcctcccaaagtgttgggattacaggcatgagccactgtgcacagccattaatattattgttacccaataaaaaaaatttggaaacttgtcttcttttcccctgattctgtttaaatagcactggagttacctgttttgaattttttttccaagcggtcccttatgagttttctctatgttttatttgtttcatttctttttttttttttttttttttttttgagacggagtctcgctctgtcgcccaggctggagtgcagtggcgggatctcggctcactgcaagctccgcctcccgggttcacgccattctcctgcctcagcctcccaagtagctgggactacaggcgcccgccactacgcccggctaattttttgtatttttagtagagacggggtttcaccgttttagccgggatggtctcgatctcctgacctcgtgatccgcccgcctcggcctcccaaagtgctgggattacaggcgtgagccaccgcgcccggcctgtttcatttcttatatcgtatttttgcaactcctttattgatacttttcttcctgattaggtttctactaaaaccaaacaagctttccatgaattagcttttagatttacttattagtttaactgttctgttgtattgtaactcattaatttataattttatctttattaattattctatttttcttcgcttttttgttgtttttctagtttttgagttagatgtttgacgcttttttaaaaagctgtgcattttcctctgggtaatactttagctgtatattatgtattctgatatatagtgtttccattacattgttttctagaaaatctgtagctttgatttatatttgtttcctctttgacctaagatatcctaagggaaaatttaacattttccagaaagaaaacaaattttctttgttttccaagaatgttgttcaaattatttctactgcttggaatttttatcatttttgtgtatccagtaaatagtcaatatttgtacttgctctctgaccacataaaagaatatattcgtgtagtttctattaatagattagagttcaattcagatattaaatgtacatcattattcatgatatttaggtcttctacatcttcacttatcttttttctacttgctttgccattaacagataaagttgaattaaaggcttctactacatacatttctccctgttattccttataggttctgtaatttttgcttcaagaatattgctttttaaatttaatatatagatacttataattacactctagcattataaagagccttttctttttcattgaatgtatttgggcctgcatatgtctaacatgaaaattatagtcctttttttgtttctttgtttgtatttacagttttaagttccattttcaacctttatgcactctttgctttaggtgtgtctcttttagttagcataaagttaggtttgtctttaatttcacctgaagtcttttcctcttaatagatgggttaagccaactgaaaaataaaactgacttatatacttttatttcaagtatgtcctccacaaatattttttgaatagattagcttatatactttggaatttgttaaaaaaagatttttataaaaaataattgtggtgaaatgtacataacataaaatttatcattttgaccatttttaagggcatagctctgtggcataaagtatactcacatagttgtgcaactatcacctccttttgatttttttttactaattttgtaaatttgtttcatctgagctgtcttattatgttttgttttatgtttttctttcctttattatgaagtcactgtattgtctgtaggctatatgtatctgtgagtgtgtgtgtatatgtgtgtattatggtttttaaaaaagtctatatttgttttccagtggctatacttaatactaataactttatgttaaatttttcattctatgtgactctagttcactaatatgagctctgataaaatcagtgctttttcgaggttaggagatcaagaccatcctggctaacacagtgaaactccgtctctactaaaaatacaaaaaattagccagacgtgatggcgggtgcccgtagtcccagctactcgggaggctgaggcaggagaatggcgtgaacccaggaggcagaacttgcagtgagccgagatcgcgccactgcactctagcctgggtgacagagtgagactctgtctctaaataaataaataaataaataaataaataaataaaatcagtgctttttcttcctctgctacctcctttccttctactcagttttagtcagtagtattatcttttttcagatttatctttgtattgttaaatctgcttatgcttctattactttatttattagctttaaatgataccttttgactttcagcttttcttaataaagcaatcagcaaatttcctttacactccacacttataccccatttcctttgtttgtttatttggtttttacttctaacttttcttattgtcaggacatataacatatttaaactttgtttttcaactcgaattctgccattagttttaatttttgttcacagttatataaatctttgttcactgatagtccttttgtactatcatctcttaaatgactttatactccaagaaaggctcatgggaacaatattacctgaatatgtctctattacttaatctgtacctaataatatgaaggtaatctactttgtaggatttctgtgaagattaaataaattaatatagttaaagcacatagaacagcactcgacacagagtgagcacttggcaactgttagctgttactaacctttcccattcttcctccaaacctattccaactatctgaatcatgtgccccttctctgtgaacctctatcataatacttgtcacactgtattgtaattgtctcttttactttcccttgtatcttttgtgcatagcagagtacctgaaacaggaagtattttaaatattttgaatcaaatgagttaatagaatctttacaaataagaatatacacttctgcttaggatgataattggaggcaagtgaatcctgagcgtgatttgataatgacctaataatgatgggttttatttccagacttcacttctaatggtgattatgggagaactggagccttcagagggtaaaattaagcacagtggaagaatttcattctgttctcagttttcctggattatgcctggcaccattaaagaaaatatcatctttggtgtttcctatgatgaatatagatacagaagcgtcatcaaagcatgccaactagaagaggtaagaaactatgtgaaaactttttgattatgcatatgaacccttcacactacccaaattatatatttggctccatattcaatcggttagtctacatatatttatgtttcctctatgggtaagctactgtgaatggatcaattaataaaacacatgacctatgctttaagaagcttgcaaacacatgaaataaatgcaatttattttttaaataatgggttcatttgatcacaataaatgcattttatgaaatggtgagaattttgttcactcattagtgagacaaacgtcctcaatggttatttatatggcatgcatataagtgatatgtggtatctttttaaaagataccacaaaatatgcatctttaaaaatatactccaaaaattattaagattattttaataattttaataatactatagcctaatggaatgagcattgatctgccagcagagaattagaggggtaaaattgtgaagatattgtatccctggctttgaacaaataccatataacttctagtgactgcaattctttgatgcagaggcaaaatgaagatgatgtcattactcatttcacaacaatattggagaatgagctaattatctgaaaattacatgaagtattccaagagaaaccagtatatggatcttgtgctgttcactatgtaaattgtgtgatggtgggttcagtagttattgctgtaaatgttagggcagggaatatgttactatgaagtttattgacagtatactccaaatagtgtttgtgattcaaaagcaatatctttgatagttggcatttgcaattcctttatataatcttttatgaaaaaaattgcagagaaagtaaaatgtagcttaaaatacagtatccaaaaaaatggaaaagggcaaaccgtggattagatagaaatggcaattcttataaaaagggttgcatgcttacatgaatggctttccatgtatatactcagtcattcaacagttttttttttagagccccattcttattttttatacactttgagagcataatgaaaagaaaagctacctgcaaaagttttggacttacctcaaagaggatatacttcattcctcaaaaggccttcttccaggaatagtatttcataacctggaggttggaaaaatctggatttgttacaaaaaaatctgagtgtttctagcggacacagatatttgtctaggaggggactaggttgtagcagtggtagtgccttacaagataaatcatgggctttatttacttacgagtggaaaagttgcggaaggtgccttacagactttttttttgcgttaagtatgtgttttcccataggaattaatttataaatggtggtttgatttcctcaagtcaacctttaaaagtatatttagccaaaatatagcttaaatatattactagtaataaatttagtactgtgggtctctcattctcaaaatgagcatttactaatttctgaacactgtgctaggtcctgggaataccaaattgaataagacatagtctatttttctgaagggtttatagcagagtcccctgtgttaataatgaaggagtgtgtggtatgtgaatcatatatcaatagggttgttaaaaataatgaaaaaaggagaagaggaagaacatcttttttttttctgattgcacgggcagccttaaaattatttttgaagtgtacaattcagtgtttttttagcatattcacagggttgtattatcatcaccatatttttggcctcttgaaaagaaatcctgtgcctattagcatccaattaccgttcctttgtagctaagtctcccccattccagctttaaacaatcacccatctactttctgtctctataaatttgtctcttttggacatttcacataaatgaaataatataatagggttttttgtgcctaaataagcttctaaagaagaataaggtaaggaatcatcattcagcaaatatttattaagacttgctttattttatacagtgtactaggagctggagatgaaaatatgtgtagaacatgaatcatatacttcgggaatttgtggactagtgggaaagattgacatatcaataacaaatcgaattagtgatgtaatagaggcatttttacaggagtaaaatgaggtagcatggactctatctgggtctgaataatgtgaggagtaacctccttacacaaagaggcacaaggctaatgtcctctgatggaatgattcaccatgcaattctaagggtgacaagaatgaaagttagggccttgaagaaatattttgattaagagctgccaataaagtagagtaaagattagattgatgtgaagaagtgggagattaatgagtaaatggtcactggcttgttgagaagattaaatgagatgtacatgtaatgtacctaacacaacgtcttgtacaaagtagccattcagtagagactagcttgtattatctccctttgaggtaaagaaaactgttagaaatagtatttctactactgatagtatttcttctacttatgcctccctttgaggtgaagaatactgttagaaaacatgacataggagaaatacccctgagagacagttcttattagtgactactgtgcagaaaagatggaggttggtgtaattaaggagaaggaaagccatgaagccaaagtattatgaaaaagcatcaatatgaattttcatgttgacaaagtggtataaaagataattataaagatggtcacttataaatacggtagttctgtgtgacacaatttacagaagttggtatatcgtgtggaagaaaacagcataagatcctgaaggtttgaactgtgggcacattggctccatgctcaggaaatggcaatggggttgggaagtgattccactttatgtccctttcagacacataaaaattacttgtgtgagtatcttatgccagacactattcactgtgtagtgagcatggtgggtatgaaatgacaactttattgtctttcctgtcaaagaacttgtaggctggttgggggaaagagaccatttcaatatgaagtgctgagctagaggtacccttagggcactacagaagcctagctgatggcttttagcctggctagacagttcaggatctctaaaagcaggtgccttgaaggctgagtcaaatacaaaaatgtattttggacagaggaaattgtatgaacagaaacacagaacatgaaactacttggttggtgcagggtatcatcagcatagaaccagacagaaccagagtgtaaataagccagaaggccatgtcatggaggccttgtataccagtctcaggaatttggttgtggagagctttcatcaggggaatgatgtaatcagcttggaaatgtagatatatcactgactgtgatagtgaggagcagaattaaggtggacgtgattagaagctttgtgaatagcagaaagaacatagattttgaaagctggcagacgtaggttactgaagaaagttacttaaccttgctatgtctttagttttatcctctgcaatatggggataatactgcctattttgtagagtcttgtggattcttctggcatatataatagaaaataaaacagctattattattattgttgatggtactatttgctatatctgactacaaggagaaagactaataggaaaccatttcaggaatccagatatggtcatgatggacaggaagagacaagagttacatagaggaattctgggaagataagaaatgtcatttttatgtactgtttgcatccatcagacaaggcatcaggaaaaatgatccttcaggaaagagtgattttttttcttcaagaaattagaagaggggagaaattggtttaagattaaggactccatgcataagagaaactgggagggaagacaggtagaaatgctatggggttaggaaggaagaatgcagaggtggattacttagaattgagacatctgatcaagacagagggatcacagcttttgctaacaaagtactagtggaggatgccactaggtgaggtttaataaataattgttgacaataagttccatttaaaaaataaacaatttatgcttcttctttgcctaagtgtcaaataaaacattcagatttttatttcaaagtatccctgagtccctgttcccttttttgtcctgctgacttttggaactgatttaggcttccttagtcatctcataatagaaaaaatcagccaggtatttcctacatttcttgtattttaaaaaaatgtaatggatgtaatgaattttaagcaaatgtaatgaatacaataagtaacttagtatatgctgttttcttctctatgctgaatgtttcatacatgttattttctatacaactacatggtcaattccttgaaaatatcaactccaaaatctttattttggtatactccacgtagcacattgagagagttttaaactcttgttggatgactgtttcaaaagtgttttgaagtaggcatgtcagttgcaaaaagtttgctcagcaaatgttgttctgtctcacagtctcagacattgagcagatgattacatgacagcacgtgattgctgggagtaacagacaaaagtaactgaaagtgctcggttatcttgacagtcaaaatcaaaagtgtcccctattttcagtgacctaagagtttctttttgtgtttttggtattgttgttaaataagtgttctcacctttgaaaaggtcaataagaattcaatacagtataatgtctgtgtgccaaatgaaggtgccccttatttttaagtgtggaggagttttgatcataagaacttgaaatacctacagaatccttgatggttaagcagctggtgccagcacaagaatccctcaatatgttctctatgaagccccgatcaccaaatgcaaacattcatgattcagtatattttcatcttgactgccaaagttgatctgtttcttaatatattacatctagacttggaactggagatgagaacagaatattatcttcctcatttttgtgtttttgttcaactctaatgtctgcaaagcacttgcgtatgtaatgatgctcagtgtcataggagcaggcaggtaagtgtaaatttgtctggataggagaaagcatgcacaacatatttcacatagttttctgatttcagtttgtttttgcaaattattcactcagtgagatagcttaaagacgttatcacagggaaaggcatggagatagttctgtgttgatagaaaacttgtaatgtacagccatgagtgagaagtcaggttcagattcttcaccttcagtcctcctctttcataaacagctccatgtcctattttacatatcctactttaaaacgagattatagaagaatgaatttctaggcaaagtgacacttattttaaaatactattacgtatccctgtgcccattaacttatcctaccatttttcttcccctgtgtccaaaccacctttagaatctcctaaatatttgtagctattgtaaacagcactggagactttgctagtttaaaaggagaaatcaacgcaattaagccctagttaatttacttatcccttatgagattataattgtattttgttattaaaagggggacagagtacactgttctcttgcctttttaatttccagactaccacttctcctgcacttgacaataccgcagtctaccacgtagtcccatggctgacaggaggagaattctaggcaggccagtgtttgagtagtgagtaattggactgtctttacccagcaactcactgttttgtaaatgtacctgagtttggagaagtaattggcttttataaggggtgcggggtggagggttggggtggggagagtgagaaggaggtcagagctttaggatatataattggtctccacaaagttgttgtgatacttttggaaccacgtaatggtcttcattaactaagtgtctgtcatgacagccattacatatgcattataataaaaatttatttacagtgtaagttgaagaaggtaaaatctggatgtagtttctaaactctgcttggcagttttcatatttaagccactagaagaaaaaaattgggagggaagctgagaagaatttactgaaagaaaaaaatacttgggagggaaattggcaagaagtatgaaaaagcttgggagggaagtaagcaaataaatgagttaatgactgttctggaaaataaactctatcatgcagatatcacatgactgattaaatttgaatttgacctcctgctttccaggtctggtaaaaactaacctgtaagaacttgaaacttagcctttgaatggtcaatccaccactgtaggagaatttatgaatgttcagttgagagaactgaaaataaagaagtaccataggaattaacatttgcattcagtagccaagatataatggacatctgaaacaggtatttgaggccaggcgtggtgtctcatgcctgtaataatagcactttgggaggccgaggtgggtggatcacaggaggccaggagttcaagaccagcctactaaaacacacacacacacacacacacacacacacacacacactagccaggcgtggtggtgcacgtttgtagtccaagctacttgggaggctgaggcatgagaatagcttgaacccagaaggcggaggttgctgtgagctgagattgcgccactgcactctagcctgggtgacagagtgagactctgtctcaaaaataaaataaaacatatatttgaaacacattgaattatgtcccttaaacaagaataaacatcactaaatgactgtaccttgaactacctgtaattttctcctgataggtaattaagcttcaaagtactgacacttatttactgtaatatgaagcaataacttaaaaaaaaaaaaaaactattgaaccagaaccaaacaggaatgccatagcattttgtaaactaaactgctatttcatttcatttgagccctggaacttgaaaataaatgctagctaacatctgtgaacagaacatacccatcagtactgtgctaagcacctttcatgaactggtcattaaatcctcactttccatttatttagtgacaacttcacccagagtttgcagtcaaagtgaaaatgtgctgaattccaaaagtgtgagctaggttttagaagttaatcacaattctggaacaaattactagcttaacaaatgagagttcttatgtctctaaaaccaaaatagccctaagtctgtccctcccagtaagatttgggccagtcaatggaacagtaatatacaaatataattacagctgtctaggagcaaactatcctatgaatagataataaaattaagacacttaagccatgttttcatattaaaacacaaagtaaaaaatcattgttttccaaagataaaagccatactgtatcatgacatatatatgcccgatgtttcgaccctcttgaagaattgagattctcgactctacactcttagcgttttctatattgaacagatgtttaatttaaggaggtcaagagaaatcttacacttattttttaatggtaccttagacatagaaggaacctcagaaatctctggctgaatatttccatctgcagatgatcatgtcattaggcttctgactctatagccatagaaaaatattcatgaagacctttcaggaagggaatgttggtatttctaaaaattgagtacaagtattctctagacaaaacagctcttgaaatggcagattgtattcccattattatatttcagaatcaagacattaatacctactttttatttaccaggtttagttatccttgaattagattttataaattaaagaaatagatttcaataaatatttgttgagttcctagtatggaaacatcgtgtttggcaccagggatgttgcctgcaagtataacaggagttcgtatttgtaatgagtttatgatttacagatatttggggggcaaagatatcattcggtaaatacttatgagtgcaaactttgaactagggactgggccaaactctaggaacatatttgatgacagagacacaatccctgtcctcaaggagctttcattctagtagagaagatgaaaaccagtacagtttggtaagttagatgatattggttaatgtagggttcttatgtaagtctagagaagtagcatttaatctgttcttagaaggtcaggaaagatttccctggaggaagtgacatttaagctgagagaggatggataaacaggagtcatctgagtgaacaacagggagaacattccagaaagagaacaaaatgtacgaggcctgatgccaagagagaacattcattgcattggggaactatagtcacttctgtgtggctgggatgtagaatgaaatgagcctggacccaagagagcactttgccctttggggaagctgtaggtattacagtaaggttggagtctggaaagaaaggggtatattgtgagatctgaattgggagaggacagttatatccagacctttatatgctccagtaagaagactgaactttacactgggggccatgggactcactgaatggcattaaatttgagagtggtcatatgaccagatttgcattttacaaagattgtcattgactgcaacatgaagtatggagtattggaggagcggtaaggctggtggcagggagataatttaggaggctttaggtgagggatgataatgacttgccaggtaggaaggagtaaatttcttctcagtggataattagaagattgaatggatggacttggtcactatttggtatagaaggggaaaaaagatgtcaaagatgatgccaatttttaaaaataatttaacatttatttttaaatattttttcagccttattaaggtataatggacaacaattgtaggtatatgtcatttacaacatgatgttttgatttatgtatacattgtgaaatgactgccatagtcaagctcattaacatatccatcactcacataattaacattttgtgtgtatgcagtgagaacatcaggctctactctcttagcaattttcaagtatagattacatttgttaccaactatagtggccacactatacaatagagctccaggacttattcatcctgcctaactaaaactttgtactctttgaccaacatcttcccattcgtctctcctccccatgccaagtttccatcttggtcagttgggtggatagtagtactatctgccgaggcaggttggtagggtgaaaacaatgtgttcccttttggaaatgctgaggtgaccagggaacttccaagggaatctgtctggatctagagcttagaagagatgtttgggctggaaacagacatcaggtattcttcagtatatgggttgtaaatgaagtcacaggagtgggtgatatcaccaatggtgagtgtagtataagaagactggactgaggacagatttccaaggaatttcaatacttaagaggtacgcagagaaaagaggggctgtgaaggacaccaaggaggagactaagagccaggagggaaaactttcaagagagtattgcattatggaagggaagaagagagaacattttaaatgatacgcaatgctcaataatggtatccgctttggagaggccaagtaagattcctaagtacccattggatcaaggtccttaatcttacaaaaacttatgcaaatcaataataaagagatgataacccgataatcaaaaatagacaaggcatataagaagaaaatgaattaaaaatattcaaagcattcaacatatacaaatgcgctcaatctgatatataatgaaagaaaagtaaattaaaacaacaatgggcatgactaaataacagtatgagggagcctgaggagaaggagcatttgaaatttcagtacagaagagaaaaggggtgacttatagaaaaaggagacagaaaccatagaacatgtttggaggataagactcaaacaggtagtggggacccttttctagagtaggatgaaaacaggtaatgtgtgtggatgcaaatatgaggtaggatgtaatgggaagttgagcgaattcatatttagtcattcattcaaaaatacttaattgagttactgctgtgtggcaagcatcattctacaaacagagggcacagtgataagcaagccagtttgtactctcgtgtaacttacattctactttgagaagacagattataaataggttaaaaagtcaataatatgatgtttcagcatcaacaataaaaaattagggtgatatatagagtgccagggaaagtgctttcatggacctcttcattctctcctctcctggtgtcataagctactccttcatccatgctgccatttctcttggtttacggttccagtatagtactcatcacattattactatagagccatccaccttatgaaggtgaaggtgtccatctccttacttaaaaaaaaaaaaaacaaacaaaaaaacaaaaaacccgaaaaacaaaaaaagaggcagaaagacagaaggtcctccactaactttcacgtgccatgtaaccagcgaaatccaattattttacagcattctagctatagaagagtttgggaagcgtagtgcttagtgttctagcctttgtagcacaggaaagggcctggaaggaaaggaattgtgtcttccgcagttgcttttctttatggggaagtgctatagcccaaacaatattttaggaattttcatctattgtcaatatgcaaactggaaggggataatgaaaatgttgtggttagaagtttatgaaatattgttattcacattttaaagtaaaaagagggaatgtttaagagacttgtttaagatcacatgtctcataattggtgggaccagcaatacaatccaaatctaactacttatctttttgctatgccctattagtgttcatattagaaaagaaattctatctcagacactaatgatttgttctttggacaccaatgactttaagttaaaacttcatactagttaatttaattatggtgtagcagtattattaaactatcaagactataaattttctatttgtaaaggagattatgataccaaagattagtgaactaatgatattgagaattctatgacataattttgaaaaatatttgcaggatatttatttttgtgtaaatgatgctttcaagctaccataatcctaagtaagtgtatatttgggaaaaccacctattctaacacacttgaaatttaaataagtcaggaaatttttttccagatcttctcccaaattatcttcatctttttcctctccccttgggaaagaatctcttcatgcctcataatatcaaatttaaactatggaagtccaggtggtggacagtcagcaaaggggaagatgagaagcttgtgttataaagccagctcttgtcagaataaggatctggtaggaacttcagaagtgatgggtaggtaagtatgaaggccaggtcctaagatctaaattacaaagcagaagacttacttaccagggagctggaaaacatgttaggaaatccagagcaggaacagatttcaagatagcacaataatatagcagtgaagtactgagaaaagagtttttttcacgggttggatttattctagcattttaggcagcatttgggcatttctaagtggtcagacttagaggagatagttaaggaattagcagctgctaaatgccaattcttagaccagttgaatcaaaatcatctaaaaagctttcagaaaccagactttttaagggccatttgagagactctcaaatctggaatccagaaatctatagctagatgagtttaaggtagagccagaataagaaaaataaaatagtttgtttgtttcaggtatcttttccaatattatttccgaacctaccccaaacaccttaaatcactgcattctatagccattcttttaaaaatgcttgagttattagttttcaaaaacaaatacaaatctgcacacatacagaaataaacattaaagagacataaagatattaaacagagttacatatacttacaacttcatacatatatattatatataaaactgaatattaagtgtttgatattagtgacaaaatctgtaacatccattatattagtgctttttgtactttttgttgggtgtagtaaaaattgcattcgaatttgagttttctgctatatatttggtcagttcctatcagtgaaggaaaaacctttttttattattttattgtttttttattttttgagacggagtcctgctctgttgtccaggctggagtgcagtggcatgatcttggctcactccaacctctgcctcccgggttcaagcgattctcctgcctcagcctcctgagtagctgggactacaggcacctgccaccaggtccagctaatttttgtatttttagtagaaatggggttttgccatgttggccaagttggtctggaactcctgacctcaggtgatctgcctggcttggcctcccaaagtgctggaattacaggtgtaagtcaccacgcctggcccctttttattttttaagctgattgaagattcttagttctcatgctttctagtggtgattaatctttagccaatatttctatatacagttattagtaatcatgtttgacttaggtcaacaaacaatctttcctaaaaaaacagaaccccaattttaatttctgaattatttagtatctattttctgctgtggaagttgaattatgttgatagatatcatacagggccatgtaacactctcagatacacgttcacatgtatagtagctgtatacaaaaatgttacttcattctctctctctttataatactcttggctctcttacgttctctcacacactctactcttcccttcctctgttctttctacttgttccctctgctcctaccacacttattccccccttgtccattttccttgtgcataaagcacaagtgcttagtaattatcaaatattaataacaatgacactaaccacccaatgatttagtgttaatgacatgctttattgaatggcattacctctaaagttcatgtttcctttacccaaccaagcttcttaccctcctcccttaccacaagcatctatattgtcaaggttgttataaagagtaataagccagccattaaaaaagggtttatggtattttcctatctacaaagtcacaggaagctcaaatgtactcagtaaatattgcaaaattacacaggaccattaaatgtaacactccaccctttctctctctctctctctctcttgctctctctctctctttctgtcaatatagcaacaccctatatcattgccctttgtatgtgcaaatcagagttaataagctttatattagcaattactccttaacaacttctggtttgtttggtccagttgaataatgtaagcacttaaaaaaatgaaattataaacatttatgtgaaaagtgcatatatcacattggatatgttgttatgcactccttaataataaagtaagttaatctttattgcacacttattataatattactttgaccctctctagtactctttatctaagtattctcaagtgctttacaatctcaaacagacccaatgtgttgtatacacagaatcctttgaagctgacatttgcctttctgaccagcttgttgtaaaggaaatcagccaaaaaacaagtatctagatgagtagctcaaacattagtacacatagtaatcacaggtcaaaatgcagatagattaccctgtccaaattctcctgagtaagagtaggtgaaacatttttaaataagctccccaggtgattctgaaattggtccaaggaccacatattaagaactaatgatccaaacaatttgactttttattgtagattaaaccatgctgagaaaattattaaaaattgaaatggcagtggaggatggtttgaaagaaaggtttttcagggccctttcaacaataaaattaattgaacacaatattaaaactctatatttgatttaagactaaggttttcattgtttttaaatctcagtaatttttatgtaacaggtcaattcatacccagcatcttaattccaatgaatgatttcccacaacaatttttgtggataactccaagggaactcgaaggaagttgtagtatgaacaaagagaagtagaatttgtccctgtgtgtaaggcttctctgataagcagcacaggctctcatactgctttttaaaaaaattatgatagcatcaagtggaattaattttttttagattatactttcatggaagggaagatctactgtgaaggctggaaaaccaacacccttaagataaatatattaccagatttgagcgctcttagtaatcagcaaagataaatgtttaacagtgcatacaaaatgaagtgttttatgttaaatcaaatagagaaagccaaacactaataatgtggttacaaatgaacaataaattaggtaatcagaacaggtacagacattaatagcaggatattggtattattaatgtattttgttttaaaataatgaacttaattacaattctcctcatcctaccccactattttattttattccagattcagcagcttcatattatgtctctgaaacacttattattaaagttatccaaatgtacacatttctctttatataaatgtttcagtccagaaaaggaggccaaatacattagctcagaacatcaaatcttctcagatgtgggaatcttttattttcacacttttaaaggtaatctgtatttctagcgtctattatagacagaaaactttcatatgacaacattcctattttcttaactgccttgataggggcgaagacaaattctaagtaggactttttaccccattcttcttaccatcattctttcacaaaacccccagctttagacaatcgctattatgaatttgacatgtactattccaatccattcccataaatttacacccatatatacatatagttatctatgaacaatatttagtagcttttttgtgtgtggctttaaaatttacataaattgtataatttgtgcacattcttctttaatttgccttcttggctacggttatctttttgagatctagctatgctgctggtatgtagaattctatttcattcttttttcattgttgttttgtacccataacgtgtcacattttatttataccttctgttcctgatggacatttagattcttccaggattttactcaatactgcaatgaaaatctttgaatttttctcttttgcacatattcaagagacttttctgacatatatatctataggtgaattgtgtagtcatatgatacatacacacattttaaatttcactagatactgccaatttgccctttgaaatagccatacaatttatagtaccaccagccacttatgaaagttcccatttcctcaaatctttgaaagttcttattataaacagacatattaattcttgccattctgatttgtaaatcagaatctctattgttctacctctagttctaatttggaattccccaattacttgtaagatgctatatattttcatgtttgttagtcattctgatttcatatcctttaccaattatctttttggtaagttattgtggtggccatgagatgtgccttacagaggccttgctagagggaatgtgattgaatgagagccccagatgctgtgtattaaaatcctgcactgagtttgtctcaagatttcttgcacgtgaatgaatgagtacagctgggatactaaagcagatgtgtatttgggagatatgagacttctttagtggctgatttttggctcataaatgactttgccaaaccttccttagactgctcagtgttctaacatcttccatccagccttctacccttctttcctttactaggggattgaatttacattgaggtctcatagccttctctgcctctctccttatttccttttatacaaatatttcccctaataaatccatgcacatttaataccattttgctatttgcaacctgcaggtcctggactaacacagttctatacattgcattaccattctctagagtgggatcttttgttgtagagagttttaaaatttttatgtagtcacttttatccatatttttctttatggtttatatttttgtgtcttctctttaacacatcttttctagcagaattcataaatatattattctatattgccaaaagtttgaaagttgcaatcattagaattaatttttgtatattgtgtaagttaagaatctaattttattgtttttcattggaaagccatttgtcccaagataattttttagtagtccctccttcccctattgtcattctgacatattttttctaggttccgatctatgcatgtgtttctttatggaagagttggccctttgtatctttgagtttcaaatccatggattcaatcaaccacagatagaaaatatttagaaaagcgtcagaattgaacatgtacatacattttgcttgtcattattccctaaacaatatagtataacaactatttatgtaggatttacattgtattaggtattgtaagtaatctagagatgatttaaagtatacaggaagatgtgcatatgttacatgcaaatactaccccatttatataagggtcttgagcattcatggattttggtatccacagagagtcctggaaccaattccccacagatgccaaggcacaactgtatttattctatcatctacttgtttaatctcacatcagtatctacttttgaaataacaataactttattatttaactttttttattacttaggattagagaatttcctctggtgaggcatcatagtgtctcaagctggccataaagacaagtgagggctaggatcggtaagactgggcagaggaagatacaacagatctcctatgcatgaagcaaaagtgcagctcagaagccagctctttcattaagttgtcctctataccctcactagattgtaagctcttgaaatgagaggctataccttaattgtctctgttatctaaaatacttccactcactgcttggaacatattgcctgcaataattaagcttgccctggctcccaaagcatagagcaaatcacactcctccccttgcctttgagaagctcacagtcttcgaaggtagagatatgtgaacagataagaaaatggatgacaggagaacagaaacgcatgactgtcagagaagtcattggagactttacagaggaaattaaatttttattgatcttgaaagagtttgccagatgaagtagaggacaggcattttagacaaagggaacaggaaatgtgaaaacacaaagtgatggaagtcatggtgagtttggagaactataaaacttcaatgtggctgaagggtaaggtggatatagaggagtgctgggaggtgaggctgaagaaataagctaggaaatgtctttttatgccattttttaaagtttggactttattctgaagttcacatggatccaatattttttgttttgtgttgttttaagcagaagcgtgacatgatcagcttgaatgatgaacaacttgaattgtttaaagtggatcacacagtctactgttttacagttattctttgaccaagatattctttattaactgaggaaaaaaagggctttcctgaattttgcagtcatgggatatatgataagcattcttgatttatcatcttcaatcctgttacataacataataaccattgttattacctttagcaatgctttcctcagtattatctaatggcctataaaatgtgactttcatttgcaaatacagtacatctaacaagaacttaccacagctgctatgcaaaataccaatacaattgacccttggacaatgtgggggttaggggtgctgattccccatgcagttgaacatgttacataacataatacataaccattgttattatgtaacaggattgaaaatgataaatctttggaaagtggggcaaatgaattcttatgaattccatatcttccacatgtgttttacttttttgataagaagtagtaacctagttcagaaagaaaataatcatccccttttacttatgcaggataccaagtctatcttagcaccataatagtgaatgataggaatcaagctctatgaatacattcacatgtacatatatatggctatataggacacatgcatgcacatatacatatatacacttgcatatatgtgtatatacatgtacatatatgcatgtatattcaattgtatatgtgtatatagccaagttattgtacagttgacctttgaacaacacgggtttgaactatgcaggtccacttacacgtattttttttttccgtttctgacacccctaaggcaacaaggccaactcctccccttgctcttcctcctcagctgactcaacatgaaaactatgaggacgaagacctttatgaagattcacctccacttaatgaatagtacatacatttctttttccccatggttttcttaataacattttcttttctctagcttgctttattgtaataatatagtatataatacatataacataccaagtatgtgttaattgactgcttatgttatcagtaaggcttctggtcaacagtagactattgctagttaagtttctggtagttacaagttatatgtgggtgttcgactgcatggggagtcagcaccccaaccctcatgttgtccaagggcgttgtccaagggtcagttgtaattggtattttggatagcagctgtggtaaattctggttagatgtactatatttataaatgaaactcacattttataggccattaaatattattgaggagagcatttctaagggtaaaatcttgtctaatgcttgaaacatcttcattttcctgtcagtttagatctttttgaagtaattctgaaaatctctcttttaagctaaatttaacacaaccaaatagccaaatatttaagttccactaatgaagatatctaaatttctgttaaaaatttaagatatatgttaaacccttctaatataactcttctctcagtcaaacttttttttttaacagttgctttgcttcttctttcaaagtcatacttcaacaaagttgctattgaatatgtctgactaaacatgttagctatatgataagatggctggataagagataaatatagaaaatgtagctttttttctacttgcaataaccctttaggaattaaaatggaaaactaataactatttgattcataatagtagcaaaccgtaaaatatttagacataaatctactaagaaatttataagacatatatggagaaaattcaattgaataaaccgttattgaagtatataaaataagatctggatgaatagaaagatcataatttttaataaaattttgcatcttaaaaagtgaaccctctccaaatatatgcacatttaataaaattataaatacatcccaatgaggttggttttgaaattttgttaattggaacttaaatttcacctaagaagaaaaaataaagaatagttaagagtgcatgctttgtagacaaattgccttagttagaatcctggctctatcatctattagctatgttatctttgggataacattcatcttttcttatagatatgcttaaaacagtgcctgacatatagtaagcacaaatatccattagctattcttcttattatttatgttattagtattgttaatatttgttattatatggaagactaaatgaccaaagagagtcaagaaatttatgaataagatttatgcgttgttagatattagagccattaaaaaaaaaaaaaccaaagtgccaaaaaacctagcacagtgttaatacaggaataaaaaaatggatcagaggaaccaaacagaaaagccagaaatggatcttaggaaacatgagaatatgatatatgatagatgctaaatgaattcagtataaaaatattaatgtaataaatcatgcttgctattcaagtaaaagaaaatgaggttagattcatgtctcataccaaatataaccataaattataccttgattaaattttttaattaaaaagcaataatatttgaaaagaaatataggatactcaatgtataacctgaaggttgggtagtacttttcaacaaatataggaatttttcacttgaaatactagaagaaaaaaagatagcaaacaaatacaggaattccaatttcaagcagatataatgatttcatgaaatgttaactgtgcacatgatagatggtctatggatagtgcaaaagaaaaagagaaaagaaaaaatgttttttaacatatgcagcaaaaaaggtttttaacatctattacatacaaataaaaatgaatgtataacacagacttcaataaaaataggcatttcacaggagaacaattcagatggccagtatttacaatttcataggtattaaggaaaatacaaattaaaatggcaaattagcaaaaattgaggtgtgattatattaatatctgttggtggtggtgattatggggaaaagggtactttcaaaacttgctaatataaatataattcttttggttgttttgtaaaggaacctgacaatatcttttaaaaataaagaaaacgcatacttttgacctagccatcccattcatgagggtatgtcttagaaaaataagatcacaaaatcatagagatttatgtgcaatgatattattggtaggtcatttttatgaggaggggtgtggatagtaaatgccagggtaaatcacatagcatctaataaacgtatttatgaactacaaaagcttacactttcagtctagtctagtccagactgcaaataaatgtgagcaagtgaattcaagcacagaagtgcttgaaggcaggtttcataaatctactttcttacagtatcctgatattgacttatcgagacagttactgtggggttgattattaaaatatttatgtatctaggtatttttcattcagtagtatgttattcaattagcaacaagtgtggggatttaaagatattcttgtttgtttttactgctgaaacatattctagtggaaatttcgaataaacgattagtcatcctaaaagcaagatacattttctcagaaaagacaaggtaaagaacttgtatatcctccctcaattcgtttataaggtaataagatgaataaaaatatcatagtacaatttagcattgtaaaataaaattaattggtcatctctagtgtggtcgtgcttggaaggtgaaagaagccaagatcttgtctgggaatatcatgtctaccttgacctcacccttaagaatcctagcctttagtttaaaatcacatggctacatacataccaacttcaacaatagtacatctggcaaggtcatgcaaacctgggacttgagcttctgattctaagtccagtgctttttgtgtacatcatctcttgtacataccttatgatgatatgctaataaaagctacgtgatcaggccttaaaaatctgctttttttttgtaatggtagaatggggcatattatcacatcaggtaaacactctattcaaggataaatggaaatgaatgtcatatatagatcattgataaatatctcattacaaaattatgagagttaccaatgtttgagtgtatattatgggccagccctttatattaaattacttcaaatttttacaactgttaaaggaagatattattatacccattttatagatggacaagttagggccagaaaagacttcctcaaagctgttagtccagtaatggagacagggctagaaaacaggtcattttgctctttgactaatgttactactcatgttttgtattttgtttaaagttttattttattttgctttatttattttttgagacaagatcttactctgtcacccaggctggagtgcaatggagtgatcacggttcattgcagccttgacctcctgggctcaagcgatcctcccacctctcaatctccagagtagctaggactactacaggtgtgtgccaccatacctggctaaattttgcattttttgtggggacagggtttcactatgttgcccaggctggtcttgaactcctgggctccagcgattcacctgccttgacctcccaaagtgccagtatcacaggcttgagccaccatgtccagccaagttttattttagaattaaaaaaaattccacttggattgttacattttatctcattgctttatatttatagaattactttataaatgccactttcttaattttcatagttagcactctttatgaaacataaactattatttgacccaggtttttgttagaggaattgagtcagagagctgttaagtaactgagatttcacaataagccagacagaccagggttcaaattctgggtctcacattatccaattcaatattccagctttgttacttattgagcaaccactacaagcacagtttacatgacatctgatagctctcaaaatgaattttacaaacataattcagatttcaactcagcagtgactcaggagaaaggacacttggatgcatttctttatggcatttttcccagggtacacgcaacctggaagatctcccaagtatgggggaaggtttcaccctgaggaatcccattccctctaatctgggacaagggggaggagagtactgtctcttatcagccatctccccagggaggcctgggccctcctggaatgcataccatggcttactgactcaaagtgttgaaaagaccaggcattgggacacacaacactactcttaaaataaaaaaagaatcagagtagcttgtggttataattgaaatggacagagtaacatggtaccaagaaactattagcaattccttccctaaatccctcattttcttaaagcattttctccttttcctcaacaagctttaagttggatttgaagaatgataagactaaaaggagggctgtttctggtctttggaggaatttgatattccattcgatctgagtgtgcaaagcctgagttcacatgaactcttctgatctctttctctaatattttttcaccttattcatatgggaaagaaggaggggaatactttagttccattctccctcctcctatttccttgacttgtttaaaatataaatgttatagacacctaagatagaaatttgactgaaacagcctcttaattattgtcttaaaaaattggtataatgaaattgcatttgtagtctttggacatttaaatccagaagggatattttctttttcttttttaaaaatttaattcaatagtttttgggctacaggtggtttttggttacatggataagtgctttagtggtgatttctgagattttgatatacccatcacctgagcagtgtgcactgtacccaatatgtagtcttttatcccccccccgctccacccttcctttatcgtccccaaagcacattatataattattatgcctttgcagcctcattggttagctcccacttgtaagtgagaacatgcgatatttggttttccattcctgagttacttcatttagaataaattgtctctagctccattcaagttgctgcaaaggccattatttcattccgttttttggctgaatagtattccatagtgtatatatgccacattttctttatccacttgttgattgataggcatttaggttggacccatattttcgcaattatgaattgtactgctgtaaacatgagtgtgctttttttttttccatataatgacttcttttcctttgggtagatacccagcagtgggactgctggatcgaatggtagttctccttttagttctttaaggaatctccatactgttttccacagtggttgtactagtttacaaccccaccagcagtgtaaaactgttccattttcagcacatccatgccaacatctattattttttgactttttaattgtggctattcttgcaggagtaagatggtatctcattgtggttttaatttgcatttccctgataatcagtgatgttgagcattttttcctgtgtttgttatttgtttgtatatcttgagaattatctattctgtcctttgcccactttttgatggaattatttgtttttttttcttgctgatttgtttgagttccttgtagatcctggatactagtcctttatcggatgcatagtttatgaatattctttcccactctgtaggttgtctgtttaccatgctaattatttattttgctgtgcaaaagcttttcagtttaattatttcccatctatttatttttgtttctgttttatttgcttttgggatcttagtcatgaactttttacctaaaccaatgactataagagtttttccaatgttatcttctagaatgcttatgttttctggtcttagatttaagtctttgattcatcttgagttaatttttgtataaggtgagcattgaggatccagtttcattcttctacgtgtggcttgccagttttcccagcaccatttattagatagggtatcctgtccccactttatgtttttgtatgctttgtcaaagatcagttgactttaagtatttggctttatttctgggttctctattctgttccattgtctacttgcctatttgtgtaccagtaccaggctgttttagtaactatagccttgtagtataatttgaagtcgggtaatatgatgcctccagatttgttctttttgcttagtattcctttagctatgtgggctcttttttagttccctatgaattttaggatttttttctagttctgtgaagaattatgatgatattttgatgggaattgtattgaatttgtagattgcttttggcagtatggtcattttcatagtattgattctacccatccatgagcatgggatgtgtttccatttgtttgtgtcacctgtgatttctttgagcagcattttgtagttttccttgtagagatctttaacctccttggttaagtatattttcatgtattttagttttttttttttgtttgttttgttttgttttgttttgtttttgcagctgttgtaaaagggattgagttcttgatttgattctcagcttggttgttgtcagcagggacattttctaaagtatagactgtagttccttatcttctatctgtttcttactgtccccttcagtattcttgtccttttttcccgctattatctttttgaccttttaatatatagatatctacttctacttctgacaatttttgcttctccaattttctttctttttctcctctgcacacatttatttattttcttctatgtacttctttatttttaacttaatatttgattaacttcccttccctgtctcttttccttctttccataaatcttcattaattgcctgcactgagctaggattctatactctctaaatcaataatctattttctatagtcaactgtgttataatcgtactgtcaagataactacttatttttaatacttaaaaatattttgaaattttaaccaatttaattaatacaatgttgagttcaaatttgaaaaaaacaatggaaaactgtaataattctagcaacctcctgctttttaataatgtattagaaaatttgcctctttttcaaaagcctacagtgaatctattcatacaaggcaaaagcaaaccattctcttcattctctttttttctccaaaagatttaagtgttttttgtttgtttgttttgttttgttttttagatattgagtcttgctctgtcatccaggctgcagtgcagtggtgtgatcatagctcgctatagcctcgaattcctgggttcaagcaatcctcctccctcaccctcctgagtagctggggctacaggtgcatgctaccatgcccagctaatttaaaaggaaaaaaattgtgtagagatgggtcttgctatgttgcccaggctggtctcaaacttccaatctcaagcatttctcccacccagcatcctgaagtgctgagattataagtgagccactatgcccaaccagatttagtttttaaaaagagaatacgatttgaaaaaggaaaaatgtgaggcaggagagaagaaatacacacacgagctgttttgtaattgctgtaaaactgaaatcttcagcctcactaaaggagcacttgcatgaacacctctaaattaccttattaccttctaaattaggtgtgaagtctaacttctaaattatgagtgaaatccactgcaattcttgttatttggatggaatcctaggtatgtggtccagttcatgagttgaacaaaagcatgctcatttaggccaggtagaaagaaataaagacctatgttttacatgtctcataaccactgaaggtccttctcataagcagtgcttatgggtattaacgacctctctatattttacttctccagtgcctaagtagccgagtccactgagtcctgctacatctcctccaacatgtcagcatttttttcacaggccttttgttactctagatcagaaatgttgatagcaacagttccttgagggcagcagctagcatgatgccagccaacaggaaccaccaaatggttcttaatataaattactacttattaatctatttactttgtgcatttggagttttgcatgtaaagtcctatttatgtccatatggtagataaatggaacaaatgaataacagaagtaaccattttgatactttagatatagataatattggattatttctggattgtgaaagaagaaggaagaagcatatggaagagaagttttagtagaggggaggaaggaggaggtggaaacgaatgtacaaggatgggaggagaaaagggagagagacttttttttttttaaggcgagagtttactacctatctaactcttcgcattcttgaagtctcagaccaaatcccatcggtttgaaagcctctagggtattctatctattgtatacttctgttatgtacaaaattaatttgccaattaattgtgaactgttttataaactatcttaaaatggttagttaaatctttgggatagtatttagctttctccaggattatgacttaccttctaaattagacatacaatgcctaggagtcaaggactattttgcataaattccagtcttcttttacaatgcctagaatgattgttaccacagaaatattcattacctgggagaaaggatgacaggaggggcagaatgaatggagagaggtcgtgagaatgaggtgctgaggatggacgaggaagaaagctgttttagttgggaggataggtgacagaagcatggaaaggaattgccttggacccatggaagcccagtgaagatacttagatcctgcaggggtgtgaataatgttcttttagtttctcttcttaggaggtttgttcattttgggagatttcttttgaaaagagtgaacttaaattggagaaaagtacattttagtatgttgataacatttgaatttgtaaaatggacctatggatgatctacacatatttatatacccataaatatacacatattttaatttttggtattttataattattatttaatgatcattcatgacattttaaaaattacagaaaaatttacatctaaaatttcagcaatgttgtttttgaccaactaaataaattgcatttgaaataatggagatgcaatgttcaaaatttcaactgtggttaaagcaatagtgtgatatatgattacattagaaggaagatgtgcctttcaaattcagattgagcatactaaaagtgactctctaattttctatttttggtaataggacatctccaagtttgcagagaaagacaatatagttcttggagaaggtggaatcacactgagtggaggtcaacgagcaagaatttctttagcaaggtgaataactaattattggtctagcaagcatttgctgtaaatgtcattcatgtaaaaaaattacagacatttctctattgctttatattctgtttctggaattgaaaaaatcctggggttttatggctagtgggttaagaatcacatttaagaactataaataatggtatagtatccagatttggtagagattatggttactcagaatctgtgcccgtatcttggtgtcagtgtatttgtttgcctcatagtatagtttactacaaatggaaaactctaggattctgcataatactggacagagaagatgtaaatatctgttagttccatcatagaccctgccactccaatgtacacaccagctttaggcttcttggtatagataaacatacattttcaaaatttttcatcataattttcataacaaaataggaaggcaaatgatgtcacttggcttaaaatctataatatttaaaataaacaggacaaatgcattaacattgttgggggaggaggtcccttagtagaaacactcttggtccaagcattttaaagctgtcaaagagatgtaaatatagataatgtatgtcaaggagagagctttgtggttaaactgtaactttcagtttaaacaattattggtgactctgatgtcaaatgtttctcaagctttatctgaacaaaattcttctcactttgttgccaaagtcgttaacaagaaatcacattgactcattgatgttttggctcctttcccttactttctgttgctttccaaaagctgagacaggaaactaaccctaactgagcacctgcaattgcctggtagtattctagtcatgtgtgtacttttgtgtgtatgtaatccccttacagctctgcaaagtaagaattgttctccctgctttacagaagagatcataagataattgaggctgttagatgttaacttgccaaaagccatacaggaaaatggtagagtcacagtttgaaccaggtccttttgattctttacattaaaccatgctttgatcttggaaatacactgtaaggcaataaatcaatagatacggataattcacaggcttctaaataaatggaagttgattgtttttatctgtgagccaaagtaagacttattctaagaattccacaaatttagataagatagagtatatggcttctagacatccaacatagaactgagtttgtgttatcagtttaagatttggttttgctgtaaggtgcacacactttgaggaactaaaaataattgtctgttcttattctgatcagaatgtgtaatgtgttgtccagttttggatgatgaatttcttatttctaatctcataagaaacttgtcatagatgtgagggagagaattaagaacagagtgtggggaagaaactgtgtacattttgatgggatccattatgtagctcttgcatactgtcttcaaaaataagttacactataaaggttgttttagacttttaaagttttgccattggtttttaaaaaaatttttaaattggctttaaaaatttcttaattgtgtgctgaatacaattttctttattacagaagtaccaacaattacatgtataaacagagaatcctatgtacttgagatataagtaaggttactatcaatcacacctgaaaaatttaaatgttatgaagaaattatctcatttctattaatatgggaactgtgtcttcatctttattactgttctaaggtcaactcaatgtagattttacttgcttatggtttcatattttagctaaatagtaaaataatatggatatacattttgttgtgacttactcatactttccttatttggaacttttatgaatatgatatagagactgaaactacaaggaacaaaatgcaatatcaattatacagttgtggcagcactgctatcaatttgttgatagtggttaacacttagaaaaacattttaaaaataatttcacataagtaatgtaatttattagctgtctctgacattttacagtttggaatagtttattttctttttggtgtcctcaccaaaacccaacatcttcaagggcaggaactgtataatttttgccattgtattttgagcacatagcatggtacttgcctctaaatagatactattgttaaaatattttttaaggtaatattttaaagtgtatgctatggtacagttcagtttgtgacttttgctagtttatgccacttacagttagcaaaatcacttcagcagttcttggaatgttgtgaaaagtgataaaaatcttctgcaacttattcctttattcctcatttaaaataatctaccatagtaaaaacatgtataaaagtgctacttctgcaccacttttgagaatagtgttatttcagtgaatcgatgtggtgaccatattgtaatgcatgtagtgaactgtttaaggcaaatcatctacactagatgaccaggaaatagagaggaaatgtaatttaatttccattttctttttagagcagtatacaaagatgctgatttgtatttattagactctccttttggatacctagatgttttaacagaaaaagaaatatttgaaaggtatgttctttgaataccttacttataatgctcatgctaaaataaaagaaagacagactgtcccatcatagattgcattttacctcttgagaaatatgttcaccattgttggtatggcagaatgtagcatggtattaactcaaatctgatctgccctactgggccaggattcaagattacttccattaaaaccttttctcaccgcctcatgctaaaccagtttctctcattgctatactgttatagcaattgctatctatgtagtttttgcagtatcattgccttgtgatatatattactttaattattattatacttaacatttttatttactttttgtgttagtattttattctgtcttctccttagatagtaaccttcttaagaaaatatatatgctaagtgttttactggtttaatatgcttagactactcatctacctcaatacttccttggagatctcctcctcagtcacacagagctcaggacttatatttccttggaactcctgttagggtccaatgtacatgaaattccctagacagacagacagtcagttatatggcttgatttcaaagtttcaaaatgatttaatggactatcaagtagtttattaggagaacagttattatactcttctaaaaataaagactttaagcaataaagatgtatatgtatataaaatggctgggttattcctagaagtacctttcttagaatttagttaaatttaatatccaagatactatcttttcaaccctgagattgtgaaaagtaacttctatcaatataaactttactacatttgtattgtgttagtgtgttacagtataatctagaacaatgtgtctttctatatgatatatgacattttaatgcctaaaaaaactgatatgtcttagatgattctagtcaggatttacttctagaatagattaaaattctatttgaggagagtcaaattaattatcgaattctcagttgttattattgctgttttatttttagtgaaacagattagtcttaatgtaaacacttgagaaataaattgatggtcaacctaaaatgtaaaaaagaaattaatagaaaatttaaagagcaacaaagctctgacatttaaaagaaatgaagtacaaatctctagggaccttaaagatcatctaataatttcctcattttctagataaataaactgagagaccccgaggataaatgatttgctcaaagtcaaatatctacttaatataggaaatttaatttcattctcagtctgttaacatgcaacttttcaatatagcatgttatttcatgctatcagaattcacaaggtaccaatttaattactacagagtacttatagaatcatttaaaatataataaaattgtatgatagagattatatgcaataaaacattaacaaaatgctaaaatacgagacatattgcaataaagtatttataaaattgatatttatatgtttttatatcttaaagctgtgtctgtaaactgatggctaacaaaactaggattttggtcacttctaaaatggaacatttaaagaaagctgacaaaatattaattttgcatgaaggtagcagctatttttatgggacattttcagaactccaaaatctacagccagactttagctcaaaactcatgggatgtgattctttcgaccaatttagtgcagaaagaagaaattcaatcctaactgagaccttacaccgtttctcattagaaggagatgctcctgtctcctggacagaaacaaaaaaacaatcttttaaacagactggagagtttggggaaaaaaggaagaattctattctcaatccaatcaactctatacgaaaattttccattgtgcaaaagactcccttacaaatgaatggcatcgaagaggattctgatgagcctttagagagaaggctgtccttagtaccagattctgagcagggagaggcgatactgcctcgcatcagcgtgatcagcactggccccacgcttcaggcacgaaggaggcagtctgtcctgaacctgatgacacactcagttaaccaaggtcagaacattcaccgaaagacaacagcatccacacgaaaagtgtcactggcccctcaggcaaacttgactgaactggatatatattcaagaaggttatctcaagaaactggcttggaaataagtgaagaaattaacgaagaagacttaaaggtaggtatacatcgcttgggggtatttcaccccacagaatgcaattgagtagaatgcaatatgtagcatgtaacaaaatttactaaaatcataggattaggataaggtgtatcttaaaactcagaaagtatgaagttcattaattatacaagcaacgttaaaatgtaaaataacaaatgatttctttttgcaatggacatatctcttcccataaaatgggaaaggatttagtttttggtcctctactaagccagtgataactgtgactataagttagaaagcatttgctttattaccatcttgaaccctctgtgggaagaggtgcagtataaataactgtataaataaatagtagctttcattatttatagctcgcaaaataatctgtatggaagtagcatatataaggtatataaacatttagcctcttgataggactaactcacattctggtttgtatatcagtcttgcctgaatttagctagtgtgggcttttttttatcttgtgagtttgctttatacattgggtttctgaaaagatttcttttagagaatgtatataagcttaacatgtactagtgccaatcttcagacagaaattttgttctattaggttttaagaataaaagcattttatttttaaaacaggaaataatataaaaaggagagtttttgttgttttagtagaaaacttaatgccttggatgaaatgagccatgggcagggttgtaatgaattgatatgtttaatagtatagatcatttgtgaataatatgacctttgacaagacacaagccattaacatctgtaggcagaagtttccttctttgtaaaatgagggaataaaatagatccctaaagtgtgtaattttagtatttctaaactttatgaaggtttcctaaatgataattcatctatatagtgtttttttgtgtgtttgtttgtttgtttgtttgagatggagtctcgctctgtcacctaggctggagtgcaatggtgcaacctcggctcactgcaacctctgcctcctgggttcaagctaatctcctgcctcagcctcctgagtagctgagattacaggcatgcaccaccatgccgagctaatttttgtatttttagtagagaaggggtttcatcatgttgaccaggctggtcttgaactcctgaccttgtgatccacccacctcagcctcccaaagtgctggtattacaggcgtgtgccaccacgtccagcctgagccactgcgcccagcccatctatatagtttaatatcaatctaaatgaatttctcagtcctgagcctaaaaatttagttgtaaagaatgatatccttgactaataatagtttctattaatggattgcatctagtgctaggtggcatatatttagtccccacaactaccctggaaggtatttaaaatttttcacatttgcagataaggaaactaaagttcagagttcggcaacatgcttgaattcaagcagctcctaggatgttaatggtggaggttgggttcaaatccagatctgtctgactcaaaaaatgcatactcctaaccagtgcactatatcccaattccataggagcccttctttgtgattcatagcactttcccatgagttttgttgattttgtgagaaacaaaactctttttcctttggactgtctggaatctctctttttcaaatttttgaaatgtatttctatgccaaaagacaaagatttctagaggaatatgcctaggatgagaattatgtaatttaaatcacagctggaaagagagaaagtcctaagttactaagaaatgttcaaacacaaatgagctttcagtctattggaagacctttatagctagaagtatactgaactgtacttgtccatggacccctgaagaaacaggttaaatcaaagagagttctgggaaacttcatttagatggtatcattcatttgataaaaggtatgccactgttaagcctttaatggtaaaattgtccaataataatacagttatataatcagtgatacatttttagaattttgaaaaattacgatgtttctcatttttaataaagctgtgttgctccagtagacattattctggctatagaatgacatcatacatggcatttataatgatttatatttgttaaaatacacttagattcaagtaatactattcttttattttcatatattaaaaataaaaccacaatggtggcatgaaactgtactgtcttattgtaatagccataattcttttattcaggagtgcttttttgatgatatggagagcataccagcagtgactacatggaacacataccttcgatatattactgtccacaagagcttaatttttgtgctaatttggtgcttagtaatttttctggcagaggtaagaatgttctattgtaaagtattactggatttaaagttaaattaagatagtttggggatgtatacatatatatgcacacacataaatatgtatatatacacatgtatacatgtataagtatgcatatatacacacatatatcactatatgtatatatgtatatattacatatatttgtgattttacagtatataatggtatagattcatatagttcttagcttctgaaaaatcaacaagtagaaccactactgatattttattatttcatattacatataaaatatatttaaatacaaatataagaagagtttttaatagatttttaataataaaggttaagagattcgaaagctcaaagtagaaggcttttatttggattgaaattaaacaattagaatcactgttgatattttattatttcatattacatataaaatatatttaaatataaagataagagtttttaatagattttataataaatgttaagagattaaaaaactgaaaatagaaggcttttatttggattgaaattaaaggccaggcatggtggttcatgcctgtaatcccagaattttaggagactgagtggggaggattgcttgagcccaggggtcaagaccagcctgggcaacacagtgagacaccgtatctacaaaataattaaaaaattagctgggcatggtggtgtgtgcctgtatgctaccattaactaaggaggctgaggtgggagaatcgcttgagcctgggaggtcaaggctgccctgaactgtgattgtgccattgcattccagcctgggtgccagagagagaccctatctctaaataaataaataagtaaataaataaacagcaacaacaaaaacactcaaagcaaatctgtactaaattttgaattcattctgagaggtgacagcatgctggcagtcctggcagccctcgctcactctcagggcctccttgaccttgacgcccactctggctgtgcgtgaggagcccttcagccctcccctgcactgtgggagcccctttctgggctggccaaggccagagccggctccctcagcttgcggggaggtgtggagggagaggcgctgggggaactggggctgcgggtgccttgtgggccagcgcgagttctgggtgggtgtgggctgggcaggccccgcactcggagcagccggccggccccgcgagccccaggcagtgaggggcttagcacctgggccagcagctgctgtactcgatttctcactgggccttagctgcctccctgcggggcagggctcgggacctgcagcctgccatgcctgagcctccccccaacctgccgctgcagtgggctcctgcgtggcccaagcctcctgacgagcaccgccccctgctccacggcacccagtcccatagaccgcccaagggctgaggagtgtgggtgcagggcgcagggctggcaggcagctccacctgcagccccagtgcgggatccactgggtgaagccagctgggcttctgagtctggtggggacttggaggatctttatgtctagctaagggattgtaaatacaccaatcagcactctgtatctagctcaaggtttgtaaacacaccaatcagcaccctgtgtctagctcagggtttgtgaatgcaccaatcagcactctgtatctagttaatctggtggagacttggagaacctttatgtctagctaagggattgtaaatataccaatgtgcactctgtatctagctcaaggtttgtaaatacaccaatcagcactctctgtctagctcagggtttgtaaatacaccaatggacactttgtatctagctaatctagtgaggaggtggagaacttttgtgtctagctcagggattgtaaacgcaccaatcagcaccctgtcaaaacggaccaatcagctctctgtaaaaccaatctgctgtctgtaaaatggaccaatcagcaggatgtgggtggggccagataagagaataaaagcaggctgcctgagccagaagtggcaacctgctggggtctgtagaagctttgttcttttgttctttgcaataaattttgctactgctcactttttgggtccgcattgcgtttatgagctgtgacactcactgggaaggtctgcagcttcactcctgaagccagcgagatcacgaacccaccagaagaaagaaactcctaacacatccgaacatcagaaggaacaaactcaggacacgcggcctttaagaactataacactcactgcaagggtccttggcttcattctcgaagtcagtgagaccaagaacccaccaattccggacacaatttgactgcagaaaatggatgtccaaccctgtggtttccctgggccacattggaagaagaaaggagttgtcttgggccacacataaaatacacttactatagcagatgagctaaagaaaagaaaaaagtccatgcgtaatctttgtgatatgtgccaccaccaataagcaaaattgttctcttattcaaaaggttggacacagctgctctagatattttattattaaatatgcaggcaattactgtttaaatgaagatttcctcacagaatgagattaaaagtatatattagtggcttagcattcattttagacaaccattttagagattcaaatcacacacttgcttacagaaattttgttgtcttcaatgtccccattgtggtttctttaccaagcctctactgttcttcacatcaccaagttaaaaaaaaaaaaggggcgggggggcagaatgaaaattgcatggtaggccacaagttcagatcctcatcgacacaagaggtgcctgaagcagtggatgaggcttttctatggatcatgagcagccacataaatgcttaaaagggcctggcagggagcatcagtgggtgatgtggctgggaggctgaatggagagcatttgttcttcagttatctatagaaggcagctgtcactcagcaccagctaagggcttcccatgagggaactggggatcaggtttcccagatctttttatgtaacaggataagacagagatccagctttttttgggtaattatttcctattttaaaatacgggtagttgattaaataaaaacaaacgaatgaacaccatatgggcacaacaaaacacatctgtggcttggattcagcttgtgaatgattactgcagatatttattctagaggacacccctgggtatgtcctaatataaaacctaaatctaaactcaagtcccatgctaccttcagagaataaatgacccagaaaaagaaccacctctcctaaggaagtataaatttgtaaataactgagacccaaacttacaactgtacatttttcttattgttgggctgttgctaacctcaattaagaaggcttgatgatatttgtaaagtgtcatcactccaccatggtccagtaacatctgatcactccaccatggtccagtaacatctgaatggtcaagaaatatctaaacgtatgtaccaaaaatttgtgtatactactgtaccaataaaccatttgtttccatttgatctctgagtgtggtaatacatgttatttgccctgctgttgtaaataaacaaaccaaatggaggcttgatgcaagatgcagtgtagcatagtgccaactctggactccgactactcagggtgtaaattctaactctgttctattaacaccatgaaactgagcaagttagttaaaactcgctgggcccattttctcatttatacaatggagattttaatagtacagctacataggccattttgtggtttaaaatacatcatgattatgaaacacttaatgtagggcttgctacataatgagcaaggtttgttgctgttatcattaatatccttaattctcattattataaaacttgagatagtatgaggtgaacaagttcataacagcaatataatgaaaattttaataattccttttatactttaacaaaaatacgagattgggtaatttattatttttacatgagtaataaatattgcattaaaatatatttaaaatttaccacattaatgtctgccagtcatgccaaatgaccaacatgaatgtgaataaaactcagtctgtgcccatttaatcttaaccaaccctttataattgttaatgatttgaacctctgccttgaaagatcacattacttgattgtcttcaacttatctgaatgtggtagtgatttctgtaaatttataggacctttgtctcatgcagctccatggagttgaacttatgcacctttaaaatggtatatacttaattaattaagtgttgatctgcttcacatgtgtataatattattagctcactaaaccaagaaaacagtggtcctttagggaaagaaactaaattacaacagagaatataaataccatataaatatctattatttattgaactgtcacaattattgcaaaaaattaccttttagtggacaaaacaattgatattgcccttttctggaaaagaaataatgtaatatatgatgaatagttttggccagtatcctctagaccttgccagttaactggctctcaaaattttgaataataaaaacttggtgatagtagaaaaatagtaattttttaaaagtatgtgcacaattatacaactaaacaattcattcaccagtgttcacaattctattgccttctttgaatcaaaatttacatagtttttcttttagactaagctcctttatgataccagtgtgcccatttctcattaccattgaaatgtctcatgagcatgtcacattctggtacaactgctaatccaggatgacagtttagttcttttaaatccaattgagagccttctactcatgaccagagaacctaaagaaaggttaagatacatttattccttggtgtaagtgatttgtctatttttagttttcctaagggtcatatttcaatttagatttttttttataggttaggtaaaataggcttcccttttgcaatatgaaatatgtagtcttttaaaaaatttcttcaaagctattaaactgaaaaaaaattaatttggtctattcagtttgttagcacttaccattttggaaagagagtgactctacttttgtatttggtaacattttccctactacagggcagtatcttttgtaagttcttagatattagcaccaaataaataggcaaaaaaaatctattatgttaattcttagaacccctgcttggcagtgcatcattgactagatggagaagaaatgaaaataatacattaggaagcagtttcctggttcttttgaaaacaactagagagtcttgttgttgactggaatatctgaagatcctgtttaatgctttcattctatgattgttaagaatatgtcatagaactgctgtatcctgtttctttatgtcttcccttctgtttgttgattagaaatccctgagtggctttacattattagtacagtagatatgtagtatattcccataataccactgctgctattgactaatagtaataattttagggcagctttatgacagttggtttatgttttagggtgtcatttgacttgtgaagcattgaaatctgggtattaagcacactgttttctatgtggtatggaatgattcttaaagccctgagaaaatggaaaataaaaatatttttcctttttaccataatcacctatgactgtcactctatcataaactgcataaactttataacctcaaaacattttggaaatgaaatgacagaacttgcttactcaattgcttctatatacaccaaatatttttttaaagtattatgttaagtccttgaaaatattttgttctactcaatagaagcagtttaggttggtagttctatgtggaaaccgtgaggaaataattttatattatgatgactagaccagtctttgaacatcactttggttattgttccattagtaaatattataattatttctgagatttactcaccttcaaagaatgttggcaatgccagcattattaacactcctctagttagaacaaagaggaaatgtaataacaaaacataataatagccaaataaagagtgacttagaatgtacacccttatctaggatcctgagtaattcgattattcttaggaaatacacttttgtgctagaacaaagacttttgaaatagctaatttctgggtttcttttcattttgaattaacttgaatttcaaggaaacaagggtagtttttacagatacagtgcatagaagctctgtgtacaatgaagaaaagtaggaaagtgagaaaaatgccattagatttttcatcgttatactatctgatatgtgaatttaactaaaacttatatacctcattatagtacttcctaatgtaatttcttaatttaagtgttccccataaggtttttttttatataaacttaagtactgttaaatatttaaggcaaattcaggtataaaataagacttgttgatatcttattccaagcatatttgtttctctcctatttatttttattctgtgttcatttccaaaattgttttactcacaactgtttgttttttctgtttcattctgtggtaaaggtatcatttggctaattgtataatttcagtgtcatttctaatattccaattgtgatagtatcaacacaagattaaatttctctacatggtttatgagaatggaatgccaaattgaaatagaacagagcacagatgatctaaatataaaaagaactacaaaaatcacagttgtttaaaaaggttttttgtttgtttatatatggtgcagaacatttgttccttagccaaatgtttccaccttgagaaagctatagagattctatgtagtcctagtaccaataatatgttttaacctgaatgtaccttatctttattcataaactgtgactttttacactgctgaaacttttttttttaagacaatctcactctgtcgtccagtctggagtgcagcagtggtgtgatcttggctcactgcaacctctaccttctgtgttcaagcaattctggtgcctcggccacctgagtagttgggatcacaggtgtacaccaccaggcctggctaatagtttttgatatttctagtagagatgagttttgccacattggccaggctggcctgaaactcctggcctcaagtgatctgcctgccttggcctcccaaagtgttggtattacaagtgtgagccactgtgcctggcctgaaactcataattcatttccattaatattaatctcaccttttccaataattaattgatttcacaagtattagtcccctataatcattgaatggctaataaaattatttatagcaaacagattaattatctgccagcagtctgagattagtttctttaaaaaatgtttattatttaaaacattcagctgtgatcttggctttcttgtgaggttcaatagtttctattgagtaaaggagagaaatggcagagaatttacttcagtgaaatttgaattccattaacttaatgtggtctcatcacaaataatagtacttagaacacctagtacagctgctggacccaggaacacaaagcaaaggaagatgaaattgtgtgtaccttgatattggtacacacatcaaatggtgtgatgtgaatttagatgtgggcatgggaggaataggtgaagatgttagaaaaaaaatcaactgtgtcttgttccattccaggtggctgcttctttggttgtgctgtggctccttggaaagtgagtattccatgtcctattgtgtagattgtgttttatttctgttgattaaatattgtaatccactatgtttgtatgtattgtaatccactttgtttcatttctcccaagcattatggtagtggaaagataaggttttttgtttaaatgatgaccattagttgggtgaggtgacacattcctgtagtcctagctcctccacaggctgacgcaggaggatcacttgagcccaggagttcagggctgtagtgttgtatcattgtgagtagccaccgcactccagcctggacaatatagtgagatcctatatctaaaataaaataaaataaaatgaataaattgtgagcatgtgcagctcctgcagtttctaaagaatatagttctgttcagtttctgtgaaacacaataaaaatatttgaaataacattacatatttagggttttcttcaaattttttaatttaataaagaacaactcaatctctatcaatagtgagaaaacatatctattttcttgcaataatagtatgattttgaggttaagggtgcatgctcttctaatgcaaaatattgtatttatttagactcaagtttagttccatttacatgtattggaaattcagtaagtaactttggctgccaaataacgatttcctatttgctttacagcactcctcttcaagacaaagggaatagtactcatagtagaaataacagctatgcagtgattatcaccagcaccagttcgtattatgtgttttacatttacgtgggagtagccgacactttgcttgctatgggattcttcagaggtctaccactggtgcatactctaatcacagtgtcgaaaattttacaccacaaaatgttacattctgttcttcaagcacctatgtcaaccctcaacacgttgaaagcaggtactttactaggtctaagaaatgaaactgctgatccaccatcaatagggcctgtggttttgttggttttctaatggcagtgctggcttttgcacagaggcatgtgccctttgttgaacctccatttgactggcatgcacatgtctcagatattataggttatcatatattgttgctcctaatatttctgtgttagataattagagtagcttggtttgtaagaatgtgatgttggtgggactgtagcagaacaagaaggcccttatgggtcagtcatacctctcttttcaaatatttggtctagctctcttctgggcatcttgttgccaatatatagtattgctcaaaagggcaggagatttgaagtgatcaaggaaaatatattttttctattgattaagtcttttgatggggtagaataatctaatttcatgtaactgctcaaagttatatggtagggggatcccaaatgtattttaaaactatttttatatcatcatatttgaagtaatagaaagtcagagtagcagaataaaggtactaaaaattttaaaaactaataaggtactttgaaagaaatcaattatgttgattcctcattaaacaaatttgcacttaaagactgaggttaataaggatttccccaagttttttcatagcaacctgtgagcactttctctgttgaggcatttatggtatgaaaagatgagtaaggcacagttcttgccctggagaaggtcacaggtgagaggaggagttgacacagaaacatttgatataaagcaaggaataaattccaagactaaaattttcagaaatctaaaaaactcaagataagaaaaacccattatattttctgggtaacaaaatttcagtgttattaacatgtaggaagatcttgatatttattctgaagcccatgtgtgttgctgaaatattgccgcatttgcatatactcatcaccatcctctgttttggagctaagaattttagactcaagatgtctaattaagttgatccattgattttattttttatggaaatctgagacccacagaaggcaggggatttgcccacatttctagaagagtcagacatgagcgatgaggcacagtggaaagaacatgagcattgcctgagctctgagttggcgctataagagcagtgatcatgggcaagtgactcttctgagccttggcctcctcacctgttaagtgaagaaaagaatatttcagaagatctttgtgagaatgaaacaaggcaatttacttgcctgctacatagccaatgggaaatcaatataagttccccgtggttcccttctgtggggttttgttcccacagagggtgcactggccattccacttcttcttttccaagctcctcattccctttaacgctgttcatagttggttccaaaccatttgaaatataataagcaccaggatggttttttctttccaccaaagcaaatttcattttctaaacactgtttataaatatcaatggctattttttcaatttttgattatcatgaaaatatacaaatatgtttaattaaatatgctaaagaatgtattaataaatatgtattaaataattcctacatataaggcctttttgcttggggtatgggtgatacaaaataaatgtggcatgaacccactgacctctagcaatttataacctagaaaaagagttatgatatgtttataagttcctgtgatataagacatgcatatagtcattataacagaggtgcaaacaagatgtatcaagtatgtccagaggaggaagagattaatcccagctggaggaaacactgatgctttcttgcagcaggggcatttgagttgagaaagggaggaaacatagattttgacaatgagagctgaggggaaaggggtttcaggtggagggaaccgcatgtggaaagcagggaggtaggaaagtgtagagtgtgtttaaagaatagaccagtttggctgaaacaggatatttgagcagaggaagcttgtactaggtaggtgggttgaggccaaattatgcaaggcattaaatattaaactaggaattttggactttatcctgcagtttatggggggtaaatgataagattcaatatcactttatttgtacagtattatgttacattttatctaattgtttgtttaattcctgtctagacaatgaattcctcaagggcaaggagcatggcttattcacctcagtaatttcagtgcctagcattgtgcctggtacaaagtggacacttgtatataaccttttttaattgaagcaacaagttgtcaaccttacaaatgtgaatccgtgattcagatgacaggttgaaatgtagattgtctgcgaagagggcagaaagagagtatgacaaaggaggacaagacagtggggcaggcagggagagagagcagccagggtttcggtagaggtatgtcaaaaaggtatggaagtcagaggagaaggagacccctatgttatagaatacaaatggaagggaaatgatgacaacagtaagttgtcattaaatgcaaggttgcaaaagtaagattgtaaagcaggatgagtacccacctattcctgacataatttatagtaaaagctatttcagagaaattggtcgttacttgaatcttacaagaatctgaaacttttaaaaaggtttaaaagtaaaagacaataacttgaacacataattatttagaatgtttggaaagaaacaaaaatttctaagtctatctgattctatttgctaattcttatttgggttctgaatgcgtctactgtgatccaaacttagtattgaatatattgatatatctttaaaaaattagtgttttttgaggaatttgtcatcttgtatattataggtgggattcttaatagattctccaaagatatagcaattttggatgaccttctgcctcttaccatatttgacttcatccaggtatgtaaaaataagtaccgttaagtatgtctgtattattaaaaaaacaataacaaaagcaaatgtgattttgttttcattttttatttgattgagggttgaagtcctgtctattgcattaattttgtaattatccaaagccttcaaaatagacataagtttagtaaattcaataataagtcagaactgcttacctggcccaaacctgaggcaatcccacatttagatgtaatagctgtctacttgggagtgatttgagaggcacaaaggaccatctttcccaaaatcactggccacaaagtgtgacattttggcattggcatcactatttgatggaagccaacctccccccaaaaggcctgtattagaatgaagatggattccctgggtgggttacacttgaaactagcctcacccatgaacactttggcacagattagctagcccattcccccacagtaaggaccataaggaagggacagaagcaaagataagttttagaacaaaagagaggggaaagaaaaaatctagggttttatgagggctgtccctgagtgatagatgtgaataggcctccagggcaggctggctcagaggctgactctttgggttggggtgactgattggtggtgaggatggagaagaaaaggggagtggaggaggtgaaagtgaccttgggacattaggtctccataagtgacaggatttaaggagtgttgtaagctgtggttgttggaccaggtttaagcacagcttcctgagcttcctgactggtttaggtcaagctccagagagcaaatgccacagtctcagtgatctccttggagaaacagttggaataggatgttgcccatgttgggatgagtcattgtccgctcttgctctttccctacccctgcaaaataataatactgtatttgattgaacatataaaacaaaagaaggattatcacataagtatgtatatataaccaacattggcaggtgcagaaaaaccagactgtcagtttgcctcatctgaaatgattgacacaaacaaatatatttactgtcccaagtgaactttggcattttggatatccttcagttgttctgtttaaagatataacttagaagcagctgatggaatatttaaatccatgcgttgaattcatgcattcaaagaaacatgtcctgagtcactaaatgctgacatttgtttttcatgttaagagtgtaaataactggtcccaaatataatattattacatcagataaaaactggaatgtgaacctcttaacttgattgtgaaagtatttgccaatggtgcctcttgataattatttgaggctcacttcagaactcctctggaagggttaatttttaaatagtcattttataaattaacatttttgacatatgtgatggctctcaaattttttcttttatgccagtttgaatcatttctgctcaatttttttttttaattgggatggagtctcactctgttgcccaggctggagtgcagtgatgcaatcttggctgactgcaacctccacctcctcggttcaagcgattctctcgcatcagcctccagagtagctgggattacaggcgcgcaccaccatgcctggataatttttgtattattactagagatggggtttcaccacgttggccaggctggtcttgaactcctgaactcctgacctcaagtgatccacctgcctcagcctcttaaagagctggaattataggtgtgagccactgcaccaggccctgttcaacttttaatgctaagattcatttgttgttgtttcacaagtgattaggcagaggtcttttatattaatttacccattttatttgtaagagagtctcatattaaggaagcataatatatgacaatccaaatacagtacaaatttggttaattttgattttgttaaataattaatcacaggggtccttcaaattgtgagctcctctggttatacttatgttttacctctggttatacttaatttcaaacaaatgaaatttcattctattcatgatatttcagaagcagatctgttgcacaaaataaagcatacctataaattttctttttttaaaaaaaagtctctgttcactctattttctattatttttctctttttaaaatttgaattttattgtggcaagtccacttaacatgagatttaccctcttaacagatttttatgtgtaaaatacaatattgttcaccatgggtaaatgttgcacagcagatctctggaacttattcattttgcactactgaaattttatacctgttgattagtatctccccatttccctctctcccctgtcctgttacccatggttctgttctttgcttctttgagtttgagtattttgatacctcatgtaatcttcattctattttctaactttgacaatgttctgacaaatttgctttccggattggagcactgtatagtgaaaattgaaaatcttggttattttctacagattcccactattttaccttgagcagacacttatcttgaagggtctcagatttgtcacttgtagaatggggaatataaacctgataatggtccctttcagttctaaagttatatcagttgaaaatacatgtgtcacttatggtaacgggtagagaactggctcactgaacagcatatggatattataaagtggttttttttaatcctttctgcagacagttactttatactttattcaaatggattattgtgaagtacatgttagcggactttgtaccttttaaaaatgtatgtatttggtgtaatgtagaaatatagaaatttattaagtatgatttatttcaatgttaagcatgagaaaatatgctccgaaaggttagatagcttgcctaaatgacaagcttgtatttcaagcagaactttctgaatcaaaagactccaagacgaatgcccagctttcaaaaactgtctaaccaaaataaatcctaagattcaccttcatactaaaattatttaaaaatagtttattttaaattaatattcacttaaaatgtatttatcatgcaatactttaaagtgtctgggaaatgaaaatatccaaagatcaaagaacaccatgttttcaaacttcaaaaatgttatcagtgacctaaacaatttttaaaattttcatagagcctatgaaaaatgtacttgcaaatggctactttctgactaggaatagaatggggagagtatttagtccaacaatgatagactggattaagaaaatgtggcacatatacaccatggaacactatgcagccataaaaaatgatgagttcatgtcctttgtagggacatggatgaaattggaaaacatcattctcagtaaactatcgcaagaacaaaaaaccaaacaccgcatattctcactcataggtgggaattgaacaatgagatcacatggacacaggaaggggaatatcacactctggggactgttgtggggtggggggaggggggagggatagcactgggagatatacctaatgctagatgacgagttagtgggtgcagtgcaccagcatggcacatgtatacatatgtaactaacctgcacaatgtgcacatgtaccctaaaacttaaagtataataaaaaaaataaaaaaaagtttgaggtgtttaaagtatgcaaaaaaaaaaaaagaaataaatcactgacacactttgtccactttgcaatgtgaaaatgtttactcaccaacatgttttctttgatcttacagttgttattaattgtgattggagctatagcagttgtcgcagttttacaaccctacatctttgttgcaacagtgccagtgatagtggcttttattatgttgagagcatatttcctccaaacctcacagcaactcaaacaactggaatctgaaggtatgacagtgaatgtgcgatactcatcttgtaaaaaagctataagagctatttgagattctttattgttaatctacttaaaaaaaattctgcttttaaacttttacatcatataacaataatttttttctacatgcatgtgtatataaaaggaaactatattacaaagtacacatggattttttttcttaattaatgaccatgtgacttcattttggttttaaaataggtatatagaatcttaccacagttggtgtacaggacattcatttataataaacttatatcagtcaaattaaacaaggatagtgctgctattactaaaggtttctctgggttcccaaatgatacttgaccaaatttgtccctttggcttgttgtcttcagacaccctttcttcatgtgttggagctgccatttcgtgtgcccccaaactctacttgagctgttagggaatcacattttgcagtgacagccttagtgtgggtgcattttcaggcaatactttttcagtatatttctgctttgtagattattagctaaatcaagtcacataaacttccttaatttagatacttgaaaaaattgtcttaaaagaaaatttttttagtaagaattaatttagaattagccagaaaactcccagtggtagccaagaaagaggaataaatattggtggtaattttttaagttcccatctctggtagccaagtaaaaaaagagggtaactcattaataaaataacaaatcatatctattcaaagaatggcaccagtgtgaaaaaaagctttttaaccaatgacatttgtgatatgattattctaatttagtctttttcaggtacaagatattatgaaattacattttgtgtttatgttatttgcaatgttttctatggaaatatttcacaggcaggagtccaattttcactcatcttgttacaagcttaaaaggactatggacacttcgtgccttcggacggcagccttactttgaaactctgttccacaaagctctgaatttacatactgccaactggttcttgtacctgtcaacactgcgctggttccaaatgagaatagaaatgatttttgtcatcttcttcattgctgttaccttcatttccattttaacaacaggtactatgaactcattaactttagctaagcatttaagtaaaaaattttcaatgaataaaatgctgcattctataggttatcaatttttgatatctttagagtttagtaattaacaaatttgttggtttattattgaacaagtgatttctttgaatttccattgttttattgttaaacaaataatttccttgaaatcggatatatatatatatatgtatatatatatatatatatatatatatatacatatatatatatagtattatccctgttttcacagttttaaaaaccgatgcacacagattgtcagatagcaattctgtgattgaaggggaaatatgtcacctcttcatactcatattggtgaagggtcctagcttcaaaattaatagattcctaaagaggggaaatgaaacatccgcatttacacacacacacacacacacacacacagagttcctcttgtcggtaagttttgttttttttaaatctctactagataaaatttgttatctaattgtgagttttacacaaagaaaaactgtcacagaaaagaaagacagtgtcacatttttcaaaagaaaaagaagaaaagaaagtgccatgtttttcaaatacaaatgttctggattgattttaggatctttagtgaaaaacaaagtatttcataataagtaaaataaaaatctatgtaggtaaatttgtttctctaatttaagaatttgaatttctgagtatttatgataagtgttgaaataacttcttatatgtgacagtgaatactggcagagcaaatgccaaatcaatgccaaatctgtaggatcatttgattgtaggaacagaattctactcaaaccgaaagcaggcatttgctggagttacagaaaggcctcatggaacaccgagaaggtggtgccattcgactcttaaagaagctgcaacaggcacaagagagtcagctgcagctcttcttcttgagtctatatctgtcctgggtccattcctttttgtggttgcttcattcctttctctctctgaagactggtttttctggtctaccagggctatgccacattgactttatgtagtgtctccattctggcctcctgaatttacaggagagttcctctgtacaaactcaaagtcctggagagaacagaaaacagcttccttttggctcaggggtccaactgcagtctactctgctgctatgaggatagtgggttcaccacctttgttgttctctcagctagggcagtgggaaatgactctatgaaaggaatatacatgggcaggcaaatgtactaatcctcatcagtactgtaattttaagcaactttaaaaaattcttttaagttatttgaaaataagatcaaagaaggctgaattacataaatgaagatttgttaacaattaattcaaaccaatataacacatgctataacatggttgagtgtgattgagtcttgatttattaggggcaataatcaaaacatttaacaatcattatagtacagaacttaccaatcaaatcagatgctcagccggagtggatgttggccacccagctattattatccctggctcaattggtcttcagctgtgttaacttgcaaacattaattaactatctaagcccctcattttcctcaagtgtaaatagacacaataatattacctattccataggtgtggggtgaatagtaaatgtaataatttgtccaaaacacttagtatagtgcctggtccatggtaaatactaaataaatgttatctgacttattattaaaattttatcttctcagcttaaccttcagaacagtaatatattggggtctagataaatcttgcctatatgaaaataatttaatactacatgcagatatatgctgtgtatattatgccttctgttagaggaattgcagaaacaaaaatttcaattaataataagatgaattatttctcccaattgtagaatcttttgacaattttatcatgcattacagatgtaagaactcttgattgggacttgatagtctaactttataataatttaagaacattcctcttagagaatttctatggccataatactgaacacatgaattttaattagctgtcctctttagccctaaaaaaaaaattactgtaatttaacacttaagtgttgttcttcccaggtacagtaatctttttttttttttttttttttttttgcatagagggtaatcttttctctttccaaatggcagaactgttagttttctgactgtccggtgaaattctaagtccacttacttcccaatagcatgcaattagcaaaggtcctccttgcaaaggcacagaacacacctaaacatcttgcagatgctgtttggacactcttcccctgcttttggtctctttgtaaagcagctcatctggatacaggatctcttttccccattgcccattctaatatatgttaccgttattacttatagaataatagtagaagagacaaatatggtacctacccattaccaacaacacctccaataccagtaacattttttaaaaagggcaacactttcctaatattcaatcgctctttgatttaaaatcctggttgaatacttactatatgcagagcattattctattagtagatgctgtgatgaactgagatttaaaaattgttaaaattagcataaaattgaaatgtaaatttaatgtgatatgtgccctaggagaagtgtgaataaagtcgttcacagaagagagaaataacatgaggttcatttacgtcttttgtgcatctataggagaaggagaaggaagagttggtattatcctgactttagccatgaatatcatgagtacattgcagtgggctgtaaactccagcatagatgtggatagcttggtaagtcttatcatctttttaacttttatgaaaaaaattcagacaagtaacaaagtatgagtaatagcatgaggaagaactatataccgtatattgagcttaagaaataaaacattacagataaattgagggtcactgtgtatctgtcattaaatccttatctcttctttccttctcatagatagccactatgaagatctaatactgcagtgagcattctttcacctgtttccttattcaggattttctaggagaaatacctaggggttgtattgctgggtcataggattcacccatgcttaactgagtggtgccaaattgtcctcaagtctgttgtactgatatatatccccatcaagagagtacaagaattctcatagctatgtatcttcaacaacacttggtgtctggtagatgtgaagtgattactaaaaatatagggaagctgcatacataattattggcttttgctgttctcttacattaatttcttattcatgttgattactcatttgtcacctagttttttcttccttaattaaattgtaggaatttatgaattatggattgatcatcagctctatacatttcaaacataatccctcagtcagtggcttggcttatagagtcttttgatgaaaagaagcttttaagtttaataaagttcaatttattgtcttttcctttatgttttgtgcttttggtatcttgattaagaactccttccttatattgggttctcaaatttagcagcataacattttcatactattatttaaatttttttcacattatttagtgatagcacctttcttattcctaaagtgtttatcattgccttctgtctttctgcttgataaatattgccacacatttgtatactttattagtgtgtacaaagaccacattttagttgtgttatttctcttgttttggttttctagaatgcagagccattaatattatagtaatgcttatgtgctaataccatatcaggggcacaaatcccattgcagcgggactgagaaattaaaggaaatgatgcacatttactcatttttgtttaaaaaatcaaatgcatatttttcaatcagactatatggttggtctggatagcttcatcattgaatttttaaagtatttttgtactactgtatttaaaattattcattcaccactgcttttgtagatggtttagaaacccaagttaggaatgactgtgcaacactattattatactctttttaaaattatactttttgcttaagtttctttccttgttctctgagacagtgttcatgttcccaaaccacacacatttattcagctataaaatttgtatgatcaactcctgtcagaacaaacatcattataaaaaatatctccaggaaaaagaaaacccttttaatgctctcttctggttcatgtgtcttcttattttctttaagcattttcataacccattgagctgtaatttaattggaacatgatttatactaaagttggtttctttacctttaacttttttttttagtttgatcagctctctttagcttctgtagttcggtctttaattccattccagtatgcttttggagttgggtctcataaatgtatagaaatgtttctgttgggaaacagcaggagaatattaaataaatattgtgcttacatctatttaattctttgcccaactttctacaactttgactttacatttaagctcctcatgcacttacatgtttctttacctaaaaatatcttttcaccatgggtgtgtacaattcctttgtccttgctgtattaattttcttggtttacatagtagcctctacacattgatgtcaaaacctctgtttggtgcatttctactctgcgtgttcaatctccatgaaagtttctgtaaggtattttcattcctctagtttttcacatgtgcatcctggctttgtgacctgtgctttgatatcgtgcctttcatcttgtggcattgaaggatctttgcaaggacctattgtgttataatacagtctatgaaaaatatcaatatttgcatttgatcacatttaaaaaaatcacattcttttgtttgaatatcaaagctaatatgtgagtgatttccctgccaaatagcacaagtagcctttcctgggtgtttatgggcatttatctggttaatgattcccatcatagtgctgtcacccatgccattgctaaacttatacagtaacttttttgttttcacctcagcatatgttgagagtaggaaatagataggactatgccctcaaattttacgtttatatgatgttaatcctaaaggtccttgtgacttctgaagtaaaaactcagtgttgtcattttacttactgaattgttagctgagtttagagttgagtttacaatggagtaaacaaggtgtttagtttgatgtatgcttttagtctttcagaaaaaaatgtttatacttggaaagaatagtttatttacccatctggcctagtttagacaaaaacacagagtcaaatgtcaacagaattctgaagttataaaaatgacagtgtggctttttttttttttaaccttccacctggtgcttatgcccaagtgcctagctttctttagctctcaactaataaaggtaatgtttagataacatttaacgttaagttgcattgtgtttatgatcacatatctcaaatattggtacacgaaactgtacaacaaccttttttattagattttcctacgaaattccttattatattccctaagatagctttttcccaccttcttcttccttctcccttctcaggtgctccaataattccaacccctgcagccagtgactttattatatctttttttaaaaatctaaaaaaaaaaattgatgcaaccaggaagaattttctcatttctctccaccagttgtaccagcctactgcacctctcctcatgcaccaccttctgcctgtgttcttgctcctatattcaggagcaagtaatatgcaatacctccctctttgtgggatctttctcattagcataaaaatactttcccttgatctccagctactaccccatttctttgacctacatatagcaaaatatttgagaaaggaccactttccatcttttcctcaatctacttccatttttttctcaatccactttcatttcattgttctcctcaacccattctttccacaacctacttcattttatttccatcagccccataactcaggatcaacatcttgccagagccaatttccttgtctcccttaacagctccagcagtatttatgccatggacaaattattcttcttgtgatactttctctcttgcttccatgacactactcccacttcattttctttctacctctctggctcttccttggtcccttttcctggccccttctctctttcagatctctaaacatcagctatatctcagccctgttctactgacactctctagctgttattttctaaacccatgtttcagaaaccatatcttgatgaatcttggaaggccgaggcaggcgaattacttgaggtcgggagtttgagaccagcctggccaacgtggtgaaaccccatctctcctaaaaatacaaaaattacctggccgtggtggcatgcacccagctacttgagaggctgaggcacaagaatcgcttgaacctgggaggtggaggtttcagtgagccgagatcctgccactgcactccagcctgagcaatagaggagactccgtctcacacacacacacacacacacacacacaaagaaaataaaccatctcttgatgaatcataaatttgtgtctctagtttagacctctatcctgctctctaaatgatgtatccaactatcatcttgacaccatcatatgttcataaaacataattatagaatatctttcagtaggcttgacattttaaggcatgagtttccgttcagtatctccttaaaatatacccagggtctcaggagactattcaaacaggacaaagcttctattctacttactaatgtgtctggccctatttggcaggttggataaaaagtcatctgaacattgtcactttatgaataatatagtttaatagtttgtgaatcacccctgcaatttaaaaaatagtaaaattatcagaatctaatttaataattcctattggaacaccccatgttaggggatttccagttatttcaattgatatctcaatgttttaaagattgtttatttctattactaattcactctttattttaacataaattgtggctatctatctctattcatttcaattatatttctcataccattctatagatggggtgaaaagaaaagtgttaattttttaaaactccatacctcaaatactatatgaatttatagttgttattgctaaagcaattatcttacatcttttcctccaaaacaaagttatgtgctggtttattttctttgtactcataagatgccttccatttttagtaacataagtcttgtctttctcctattcttagctacttaagcattatgtagcttaaataagcactaaagattcctatctgtatgaaaaaataaagattaaataaataagatctagaaagggtgacaaggtgatgcttcaaaatgaaccataccaagccatctagcgattgataaattactcacactcataatcacattgttggaaagaagccattgacaattcagtttgtttcacaactgtctatcacatagtgagcacaactaaaagactactttttgtcttttactgcttgttttgttgatcaagtgactgattgtacaatgaccaacaagaagtctgatgtgtagagaaaaggggaacctggcttttctgccttactcctgatgcctaattctgagcatgtgaatattattctgtttctttaattctccaagtgaagcagcagataaaccatccttgtttccattagctgtctaccctgttcaactgtgtgtttctaataacataagaataagaaagccaccagggtgagcagggaaggcaatgagtctgcaaggcttgtggatagatttctgttagtgaggctctagaaagttcttccaagattgatgcaatctgagaagagttttctgtcaatacaaactccctgggtttctcctttgtccttttactgcctgtgtttgttttgggttccagtaaagatcaagtgactgattgtaccatgaccaacaagaagcctgatgtgtggagaaaaggggaacctggcttttctgcattactcctaatgcctaattttcttgtactgaaagtagtttttgctgtaagaatctgaggggaggagtcatttcttcaatttttttttttggtctccttttaatggtttcttgatcatgtctatccttatttttctgttttcacaaatttttgtggtatattttcctctcatgacctctgtctcaagacttctttccatccatctcttctcatttcatcctgtagagtgtctgtggtaagagccctgcattctactctggccttgccatgtgtggccttgggcaagtcctagcctccttgagggtcttatttttctcatttgtaaaatgaaacagtttgatgagaagttttctaaggttccttcaagctttgacaatctctctcttctggatctttttcccatgaaaaatttcaactcttgattagcatgtaggcagggattattccacatccttataggaatcacatttctgctactgtccctgaatgctagagtccattgattaagttattcactgctgcaattgtcagagctgatcaaagaactctgaaccagtgtgttactagaactaacaaagaaaatgccattatgatgttctagagtcttgaattagtagaagaggtttaataagaaccctaagggattgctagaatgttaaaaacaaacaaacaaaaaaaaaggttgaaaagtttagaaaattcactggtctttgtgcccatcattttacttccagggtttagataatctcatttttgcaatgaaggaatggattagatcacaagttctcatcctagtagcacatgcagaatctttataaaaacacagagtagccaggtgcggtggctcatgcctgtaatcccagcactttgagagcctggggcaggtggatcacttgagaataggagttgaagaccaagctggtcaacatggcaaaaccctgtatctactaaaaattcaaaaattagccaggcatgatggcacatgcctcccagctactggggaggctgaggcaggagaatcgattgaacccgggagatggaggttgcagggagctgagatagctccactgcactccagcctggtgacagggtgagactccatcacaaacaaaacaaaacaaaagaaagcaaaaacacagattactcagggtccactaagaccagtgaagtcagttctcttggtagggggcagggtgactgagcatgatgtttgtaattttaaaagtgctccaggtgattctagcgtgtatcaagcaagacttgtgaaccactgaactacatgctaagactcattttagctctgattttctgtgagtcatagcagagggctcagcaaactttttctataaatgctaagatagtaaatattttcagctttgtgggctgtatcgtctttatgacaactcaactcagtctttgtagagaaaagcagctgtacataatatgtaaactaatgggagtagctagatgtgtcctgtgggccatagttttgctgactcctggtctatgtcatagaatttccttttgaattgatggaccaccagcaaatgatttttgtcctgtatcaatcaatgatacatacataaatctctacaagacatgtaaaggatgaggcttaatgacagagtactttggggaagacataatattgcaaaattaagatgcttagagaaaaatcatattaaaatagtgaaaactgtgagaaggtattttgatttgttgttttggattcctctttttgcaaattcttttgaaatattttcagtggaagctacatagatccaattgtattcaccaagctagattgtaattaagctccagagtaagtaatagatttgatgagtgatgtccaaccttttacatggaagagtaagtttgagtcttcctttgcccattgacacacttagtaccatgtttaccaaagttcttagttattgaaatgggcaccagcatattttgaaacgttggtgttaacttgggatatgccttttgtcatgttgcaaatagattttgtttctgttttgtgaagatcaccatctctgtcacttctgatagaaaaagtgacactgacttctcaagtgatttgacacaggttaaaatatgtaaaccatttctgtagagagcaagctgtaataatatactaaagggctaggtttatagtataatataaataactcatttatgctgttaataatttatagcaacatggcatttgactgactttttatgtgctctagtcatgtaagtaatagatgtggaaacatagaccagagtttcaagaacatgttttgggcagagtctgttttcttgctattatctcttaagtttatgttcatggcctaaagattatgctaatggatctgccttggtcttgggtgtcaggtctgtgttagcgagtattgaaaagcatagtttttgcctactgggaaggatttatgatttaaaagccctaaatctccccttttatgtacttcatacttagaaaatttttcctgtaaactgtgtgacttttttacattgtgccagttttctagatgactctcgtcatatttatttcttgcaatccttctataactatcagttatgaagtctctttatagtgttgccagccaggtctcaggtgtgtgaaatgtattttctattatggattttggggtatgatggcacatagtttgggtgttaatgcctaatcttgatgtactggcttctgaacaaccaaaaggatgaaaggaaatagaacaaatatttttgtgagggagaggagtctggcttcttgacttactctagaaaaagcctgtaagcctcctcttccctccttgtcacacaaagtgacaaagaaaatcaagaattgttttcttcttggcttaaatgcatcccttataaagtaaggctgagatcaggctgtgaagctatctttttgtcaagactgtcataattccaaaacactttgttcttctaatgcttaggttagtaactttaaacatttttataaagatagtgaggtccagttttaaggattgaccccttctcaaggggctcagaagaggttttggagaataataaaattaaataatgaaaccaataatttaaaccagatcatgatccttaagaaaaaatcccatcaaatttgggctaaactctaatatacagaggtctgcacaacttatgtcaagtattcttccccacaaatgaagaatggggttcattgtgtcattggttgggtctcattttggcttcatcttctatttctcaaagtctaagaaaagtgctcctacggaagtgggtgttggctatcatgagactttgctgctggcaggccagcttgctgctctagacagagatatccctcgatcctccttggacaactgttttctgtgcacaggaagcagcaggctggggttaaggagtttgccaatccagtcattctgataattgctgaatatgaatttctatccagcacaatctaggtagctacaatggcacagtagtttttatgtatcaggtgaaaatgtttaataggcactctaaatgagagaaaaggttaagtgaggttaaaagctcaatgaaaacaaatagatgagactaaaaatagttcaataggttgtaacttccatctcatccaaacagcaatgaatattttgaggctgaggcgctgaggggtaaaattgcagcctggactacttgctaatgtagacctacagcactgtcattcttactgcacagacactgctttctgcataggaggtagaataatgaattcatttattattaacaaagatttattaagtgactgcatggtgctaaccactagatggggagggatgttttgaactgtccattgtttgactataacaaggaacgctttgaacgaggttactatcataggcagaatttgtttaacatgaagcctatgagacataagccacaggtcctctcacgtgcaggaactcctttgaaggccctatacttaattttatatgcatagtttggatttggattcttttttttttaagagttccccaaattacttaagcttcaggctccacaaaacctggatctacccctggtagcagctatgaatctttgactatgaaattaagtgtacaagaaatatgactttactttttctgtgattgagtttattttctatttgagcacgcattccactgagtgaaagaaataatatcattgaattcagagattttgctgggttctaagtggagtttacagaatgccatgatattaggaattaaggagtgtgttgccctacatcatcttttgtccgtgctcactgtctctgaggcactgatgttcctatgtgacctagaggggcatggtccaggtagatggagtctgtccttgttctcactgtgagctctcgcttgctgacccttcttcagtttcttccatgcccctgaggggtaaaaagattcaaatctgaagctatatcaagccatctgtgcatagacattccaagcaaccatgttcactctactgctcccatgtcatgcaaggcacaggaagcttcactatggcatgagtatttcctgggctttgccttggaattgaggcacgggcctcctttgttctaaaattccccaaatctacttgaggatagaaccaggatttggttgcaaggcagaacttttcttagaggacctggtatctaaaccctcttgttacccccatttatggaccccatttatggggtgaggagagtgactgcttctaatccatcataatttttgtctatggctactgtttttgcatagacactatgttttgagtccttaggctttggcttttggcgcttaatggccaatattcacatggctcaaaattttcaaatgatccatatctgacttgagtttcaaaagtcagtttttgaaacttaaatgatcagaattgatttgttctgctctggttctgatgtggcctctccttccagaggtactggaggtagaatatccaaggtggaaagcccacgactacaaggaattggttagtaattcataatgttagctgtccacatctattcagtaatggcatttcagtggctgcacaactgaccatggtgaaagtgtctgcacaagccactttttcttcctgtcagaaaatgttctcacccactgaattgaatgactgtctgctcatatgctgtgaatgagtgcccagtcttaagattaaatcacacgttcttggctatgcatatttgggcatgctgtggggagttataataggctgtcttagagtcacattaagcagctagacagacaatgagttggaaagttacattttctaaatttgattggtacattccatttgtcacatttgacattagaagttctggattcaccctctatggtgagcttcactaatggagaatgtaatttgcaatgctcaaacacaagtcctaaacagaaaacattgtatgttacattccagtgctaccaaaatagtggttttgaaagtccttattttctaatactactatgtgtaattttgagtcatttagatagcaacagttaaatgttttatagattgtttggaagtattaaaatgtgaaggatttttgttatatagtgtctttcctatcttgcttaataaaatataagtttagaattgtgtatagaattaacatgcaaaaatatcaagtctcaactttatacagttaatctacatttgtgtatacccttcaattatttcaagagagggatactattcttatgcaggataaatacaataagatattttaaatgaattttaactacatctctggcagtttcatctcaatagtagttgtaattttatctcccagaccttattatagactagcagctctctatgaaaattagtgacagtgtgagtgtattttaattcaaagttaatcaagaatgactgagtcaagagttagctacccctgaaagtaactcataattcagaatttaaaatattacatgtggaacaatcatgactatatgccttttactttctctatcattatttaggttgtgggctttgggtccttttcacatccgttaacagtgggcttgacttcaaaggattattttcttgaatcttgaataattgctgaagacaatttgaagatattttcaagatgaaggaaactgaagcacagaatcactagagtgaaaaaagaacttcacaaacagtgcaggcttgatcaatggcatgggaaaacaggcaatacagttagaattgctaagatggaattttaacgttcaattaaggatctatctctaaactcctctgctttatccaccaatcattccatattaaagatgaagaattgttcccatttcaccttttgataaggaaaaatagaaataacagaagcaaatacacttttgcccacatttttttccaaaaagaataatttttgaagtctaaacgtttggtgtaaataagatgatgtgttaatattgtaaaggaaagctagttaagtttttgactgaataaagccagcatcaataattactagtaagactaaaaataagagcagtaaaattgtgtctaatcagctactaatatctgggaaggattgagccacaggatcaaagatggtatcttttaaaaatagaagttgagtgaattcggtcttcaaattctttctttttattcatttatatttatttactcattagtatattcattcctttattcatgtattgttcaaatatatattgggtacttattatatgccaagttgtttttaaaatcacattccaaattcccgtaagtcataattattcagagatgtatgttttttttaaaaaaaattgaacacctttaaaaattatcaagtccttttatttctgtatgcattaaagataaactttactaaatgttacatgaatagatttataaagcagataaatatttaatttcaaatataacccttatatgcaattatattttccttagcactaaaaatgaatatttaagtaatttatattaaaagtgtaattatttaactgcagatgtatgccaatgacttaaattgtttaaagattatagcaaagttgtttaaaattgtctaatcatgaagagttcacttaaccacctggttgacacataaaattatagttagttactaaggtagttcgagagaaagagaagaatcttcagtagtggttttgaggtgtggtacattttattataatataccggttatacagcattgtgcagtgctgctcatagtagaaataaattttctctttgatgtcatctattcccttgtgtggcttacataactgagaattaggtgatcacaaaaataaacaggcctatacagagcccatttatataagtcctggttatttctcttcagttaaacttttaattatatccaattatttcctgttagttcattgaaaagcccgacaaataaccaagtgacaaatagcaagtgttgcattttacaagttattttttaggaagcatcaaactaattgtgaaattgtctgccattcttaaaaacaaaaatgttgttatttttatttcagatgcgatctgtgagccgagtctttaagttcattgacatgccaacagaaggtaaacctaccaagtcaaccaaaccatacaagaatggccaactctcgaaagttatgattattgagaattcacacgtgaagaaagatgacatctggccctcagggggccaaatgactgtcaaagatctcacagcaaaatacacagaaggtggaaatgccatattagagaacatttccttctcaataagtcctggccagagggtgagatttgaacactgcttgctttgttagactgtgttcagtaagtgaatcccagtagcctgaagcaatgtgttagcagaatctatttgtaacattattattgtacagtagaatcaatattaaacacacatgttttattatatggagtcattatttttaatatgaaatttaatttgcagagtcctgaacctatataatgggtttattttaaatgtgattgtacttgcagaatatctaattaattgctaggttaataactaaagaagccattaaataaatcaaaattgtaacatgttttagatttcccatcttgaaaatgtcttccaaaaatatcttattgctgactccatctattgtcttaaattttatctaagttccattctgccaaacaagtgatactttttttctagcttttttcagtttgtttgttttgtttttctttgaagttttaattcagacatagattattttttcccagttatttactatatttattaagcatgagtaattgacattattttgaaatccttcttatggatcccagcactgggctgaacacatagaaggaacttaatatatactgatttctggaattgattcttggagacagggatggtcattatccatatacttcaggctccataaacatatttcttaattgccttcaaatccctattctggactgctctataaatctagacaagagtattatatattttgattgatattttttagataaaataaaagggagctgaaaactgaattgcaaactgaattttaaaactttatctctctgtggttaattgcaaacacagatacaaaaatatagagagagatacagttagtaaagatgttaggtcaccgttactaacactgacatagaaacagttttgctcatgagtttcagaatatatgagtttgattttgcccatggattttagaatatttgataaacatttaatgcattgtacaaattctgtgaaaacatatatataggatgtgcgaaaagtccctgtgtatcatgtgaaatggcttaaaacagaacaccataggtattcatatcagtgaataccataggtagctgaaagtgttttttcctggggtcgccaagatgaatgccaaaagtgatatcattattataaacaatagccagaataggttggtataaacctggtagaaagccttgataaattgactttctctcctcctgacatcctgccacccctttgctttgctgatgctcatttgtccactaaattaaactcaagcaagccctagtaaagtaatagaatttgtggagtcctcattagtataggaagtttccctgatgtgagattagtaattagagatgtagcaaaatgagaaagaagtaatatgcttagatatttcattttctctgaacctgtatatacaaaataggccatgcgtgttcagtaactattcactgcaaggcactctctaggtactttgggggaattggaaattactcacataaggctatggattgtgccatttgtcaaaagacaaaatgacaacaaatttagtttaaagacctcagtcagctttattttctattctagatttggacagtccttcatttcacaaattggagtaagtgttccaataagttgagcaaaggagcttggctttatagacccaaaaaaagggccaaaggaagcagaaacaaagaacaataagagaattggtcatttcaaagttacttttcttgaaaggtggggacaaggagacagaataatagaaaagtcactgattggttaacattggattaagaattaaaacagaggaaactttaagattgaagtttgaaactgacttgtttgggaaatcaggctgtcttctttcttgatttcttagaaggccggataacaactgagttttgctttggtgaacatgggtgactccatttttacttttagtctggtctgttgaggcctcgtgagagagcttaatctaaaacaatgacttcctataatttttgtttgacacatccaaagagggactctaatatttattgagagcttatcatatcttaagtactgtttaaacacttttatttgctattacatttgatcttattataactctaaaggcagaaatgattgcttttattttccacaatggaggaaactgaggttcaattaagtgagtaaggaagcagggatcttaaacccagataccattgctcctctttaaaggtggaagaacagaaaacatggggcaggggaagagagaaagtttctgtcccaggacatgataatctaaaagggaaaacgtaagatccactgaaacctgaggcagatttattgtggcaataacaaagcttaagtttcacagaccttcatttgcctgagccaactttgaaggccatgtatctaattttgtttttataattctataatctttattcttgaaaagagccctccctccaaatttacaagctttgggcccccaaaatccttgaaatgcccttgaataagagatatccaggtaaatgctatgggaattcagaggaggaagcagttagtatcagttggcggagagttaggctattaagagaaggttttatataggaagtggcatttagaatgaagctttgagaactgagctgtgtatttgaacaagtaaaggtggtgttgcagaattttgctccttagttctattaaaaacccgggttcttgtcacatgatccggaaaatttaggcacacagatacattgaagcatgagtagagcaggattttattgggcaaaaaggaaaaaaagaaaactcagcaaatcgagatggagtcttgctcacagattgaatcccaggccaccacaaaggaactgaagagatcgggcttctcccctgcataaggtgcaaattccccatggctccacccacttccccttagtgtgcatgtggggctccagtccacggtgggcatgcccagacaagccttgggcaggttccctcatctgtgcaaaagcatctgatgtaaacacttgaggggtggttcggagattctctgggacccttttattttcttatctgcctaggcatttggctgtctcagtgggtgggaaagggtgctccaggcaaagggcataacatgaggcaaagggcatgcacagaaaacagtgactggttcagtcaggttgggggatgccaaaggaagtaatgggagacaagattggagcaagatagataagagattgtggattttttttcttttttatctatataaatacagagacagggtctcactatgttgcccaggctggtctcaaactcctggcctcaagtgatcctcccacctcatcctcccaaagtgctaggattacaggcatgaggcactgtgcccaacctccaattttggattttgagagctaaagcaatatagtcgaaaactcagataatccaggtagattttgctattaggtgctatttggttcctggtacagagctaaaacccttggaatttcctaagtgataagagctacaggagcatcttttgttatatgtttccccccctagttcctgaaatagctctagagaaatacaggtgaataacatcctttgttattcatatcaagcccctatcaaccataccccagtttctatttatgaagtggcttttgggaagtccctaaagacaggagtggggaaaggctggttgtcagggggatgggttgaaactttcatcttccccccttgacctccagggagggatgagtggctgaaaattgtgtaaaatcaacaatggccagtgatttaatcaaccatgcctatgtaatgaagccacccgataagccttaactggaactttttggagagcctccaggctggtgaagacattgaggtgctcagaaggtggtattccagagagagcacagaatctctgttccccttcccacattcattttgctatgcatctctcccatctggctgttcttgagaggtatccgtttataataaactggtaacctagtaagtaaactgttaccctgagttctgtgagccattctagcaaattatcaaacctaaagagttcatggatacgtgcaatttacagatgcacagtcagaagcacagatgacaatctgggcttgccattggcatttgaagtgtgttgggaggcagtcttacaggaatgagcccttatcctgtggggtctatgctaataacagacagttgtcagcattgcttggtgtcgaaaacccacattgttggtgtcagaagtattgtcagtaggatagggaaaacagtttgttttctttttttagtggtctttggtcatctttaagagcagggcttctcaaagtgtggtccttgaaccagcatcacctgtaccacgtaagaacttatgagaaatgttcattcttgggccccaacaaagaattaaaaattctgagggtgtgaacggggtctgagtttcagcacaacttcccgaccatgctgatgcattcttgcccaagcatgaaagccctcccttgtttaagaaggccattagggccgggtgtggtggctcatgcttgtaatcgagcactttgagaggacatagtgggaggatcacttgagccctggagttctagacaagcctgggcaacatggcaaaatgctgtctccacaaaaatcacaaaaattaggtgggcgtgtgttgtgtgcctataggcccagctacttaggagactgaggcaggaggatcgcttgagcccaggagattaaggctgcagcgagctgtgatggcaccactacagcctggatgacagagtgagacactgtctcaaaaaaaaaaaagaaaaagaaaaagaaaaaagaaaggaaaatgaaaaagaacgccattaggtataaaggagcaatggtaaaagaccagttgcaaaaggttagggaatgggtggttactgaaataagaagctatgtagaacactagtgttggtggcaggaagtagaaagcaagagcactgctctgtgggggatggtcatagcaaatgcaatatggaggcatttgcctctgcactgaggagaaaactatcttttccaagataggaggaaaggagataagtggaattaaagagaacctttgagcacagagttgggaaactgaaggtatttgtgttgtgctccctcaatcttttaattcaactataagctaaacccatgaaacttgagtagtttcagttatctgacttttttcttctcttttgatacagtgttggctattctgggtcttttgcctctctttatgtacttaagaatcagtttgccaatgtatgcaaaataactggctgggattttgattgtgattggcttgaatctatagatggagttgggaaggactgacatcttgacaatgttgaagcttcctattcatcattatgaaatatttctccatttgtttgattctttgatttcttttatcagaatttagttttcctcatatagtcttttaaaatattttgttatattttgttcaagtattttgtttttgaggaatgccaatgtaaatggtattgtgattttaatttcaaattccaatttttcattgctgttatataggaaaatgattttttttgcatgttagccttatatctttcaactttgctataatcaattattgatagtttcaaggattttttggtcaattattttgaatcttctacatagattatcatcatctgaacttagttttatttcttccttcccaatctgtatacctttatctccttttcttatttcattagctaggacttccagtatgatgttgaaagtagtggtgagaggggatatcttggtcttgttcttgatcttagtgggaaaacttcaagtttcttatcattaagtatgattttagctggagggtttttgtagaagttttttttttttaagttgaagaagtctccttctatttttagtttgctgatttttaaaaagaatcaggaatgggtgttaaattttgtgaaatgcttttctgcaactattgatttgagcactttatttttcttctttggcttgttgatgtgaagtacattaattgatttttgaatgctgaatcaaccttttgtacctgagattaatcccgtttggttgtggtatataattatttgtatacatgttgagttcgatttgctaatactttttgagaatttttgcattggtgttcatgaaaaaatattggtgtgtagttttttgtgacatctttatctgcttatggttttaaggtaatgctggcctcatagcatgagttagggagtatttcctctacttttacatttgagaagagattgcagagaattagtaaaattcctactttaaatattttgtggaattcaccagtgaacccatctggacctggtgctttctgttttggaaggtcattaattattttaaaatagatataggcctattcagattacctattttttctcatgcgagttttagcagattgtctttcaaggaattggtctatttcatttaggttatcaaatatgtcaacgtagagttattcatagtattcttttattatccttttaatgtgcaagggatctgtagtgatgtccccttttttgttttattgatattagcaatttgtgtcacatcttttattttgctttgttagccaggctagagatatctctatttttgatgtttttgatgaaccaactttttgttttattgattttctctgttgatttcgtgatttcaatttcatgatttttaaattatgcttacatttgatttaatttgatcttcttttgctagttatccaaggtggaagcttatattgttaagatccttttgcattcttatgcattcaatgatgtaaatttccctctaagcactgctttttctgcatctcacaaatattcatgagttgtattttcatgttcatttagtttgaaatatttttaaatttctcttgatatttctcttttgacccatgtgttacttagaagtgtgttgtttaatcaccatttttaaaaattttctagctatctttctgttattgatttctagtttaattccattgtggtctgagagcatatattgtataattttaatttttataaaatttgttaaggtgtgatttatggcccagaatgtggtctatcttggtgaatgttccatgtaagctttggaagactgtgtattctgctatatttgaatgaggtagtctatagacatcaattatgtccagttgattgatggtgctgttgaattcaactatgtccttactgattttccacctgctagatctgtccattctttgcagagggacactgaagtctccaactctagtagtgaatattctatttcttgttacagttttatcaacttctgcttcatgtcttttgatgctttgttgctagaaacatacacatgaagaattggtatgtcttttggagcatgacccatttatcctcatataatgcccctcattatttcctcgccctgatgtctgttctctctgaaagaaatatagcctctccaggtctcttttggttggtgttaaaatgacttaactttctttatcccccttacttttagtttatatgtggttttaaatttaaagtgggtttcttgtagacagcaaatagttcagagttgtttttcgatccactttgacaatctttgtcttttaattggtatatttggactattgatattttaagtgattattgatatagttagataaacatctactatatttattactgttttctgtctgttacactacttgttctttgtttatatttttattgtctactctttttctttccattgtggttttaatcgagcattttatatgtttccattttcttttcttagcatagtaattcttctttaaaaaaacattttttagtggttgcccctagagtttgcaatatacatttacaactaatctaagtccattttcaaataatactaaataatttcatgtgtagtgcaagtaccttttaataataaaacactcccagttccaccttccagtctcttgtattatagctataatttagttcacttacatatatgggtatacctaagtatatacattatcatatttatgattgaatatattgatgaaattattttgaaaaaactgttatcgttaaatcaattaagagtaagaaaaatagttctaattttattataaaatgaaataccttcatttattcattctctaatacactttctttctttatgtagatccaagtttctgacctgtataattttccttttctctcttcagcttctttgaacatttcttaccagccagacctactgacaacaattttccccaatttttgtttgtctgatagagactttatttcttcttgacttttgaagaataattccacagggcacagaactctagattggtgatttcttcccctcaaacccttaaatatttcattccactgccttcttgcttgcattgtttctgagaagttagatataattcttatctttgcctttctataggtaagatgttttttcctctggcttctatcaagattttttctttatgaacatgatatgcctttctttttgaacatgatatgcctttctttttgaacatgatatgcctttgtgtcggattttttttggcattattctgcttggttttctctgagtttcttggatatgtggtatggtatctgacactaatttggaaaaattctcagtcattattgcttcaaatatttcttctgttcttttttttcctttattctccttctggtattcccattacatgtatgttacagtttttgtagtcatcccgctgttttggatattctgtttttttcagtttttttttccttcgcatttcagtgttggaagtttctattgacatattctcaacctcagagattctttcttcagctgtgttcagtctaccaatgagtccatcaaaggcattttacatttttattacagaatttttgacctatagaatttcttttgattccatctttgaatctccatttctcttctgcttttcatctgttcttgcatgttgcctactttttccatgaaaacctttagctttttttttttttctttttgaggtggagtctcactgttgcccaggctggagtgcagtggtgtgatcttggctcactgcaacctctgcctcctgggttcaagtgattctcctcctcagcctcccaagtagctgggattacaggtgcctgccaccatgcctgagtaatttttgtatttttagtagagatggggttttatcatgttggccaggcgggtcttgaactcctaacctcaagtgatctgcccaccttagcctcccaaattgctgggattataggtgtgagccaccatgccctgcctttagcatgttaatcatagttgttttaaattcctgatctgttaattccaacatccctgtcatatctgactgtggttctgatgcttgctctgtgttttcaaatggtgtttttttttttttgccttttagtaagccttgtaattttttattgaaaggtggacatgatgtgctgggtaaaaggaactgtagtaaataggcctttagtaatgtactggtaggtgtagcagagggtgagggaagtattctgtagtcctatgattaggttttagtcttttagtgagcctgtgcgcctgcagcttggaagcacttgtgaagtgttttttcaccccttttggtgggacatagtgactagtgtgagcgggagttgagtatttcccttcccctaggtcagttaggctctgaaaaaaccctgataggttaggcatggtaaaatagtctcttttgagggcaggcattgttataagaatagaatgctctggggccaggtgcggtggctcacgcctgtaatccccgcactttgggaggctaaggcaggtggatcacctgaggtcaggagttcgagaccagcctggccaacatggtgaaaccccgtctctactaaaaatacaaaaatcagccaggtgtggtggcacacacctataatcccagctactcaggaggctgaggcaggagaactgcttgaacccagtaagtggaggttacagtgacccaagattgtgccactgcagtctagtctgggtgacagagcaagactccgtctcaaaaaaaaaagaatgctctggcatatttgaaaatggttacttttccctttttttctctgatcttcactgtgagaacctggtaagcatcctataggcaaaattcataaaagtatagaagtcggccagtgacttggacccacttggaattttcttgctctcacatcatgcacactgaatctccagcaatttttcacttacagtttaggttttcctaccctactactggttctctcagaggtttctgcttattggtttctgttttgtaagttgtgattctctgtacctaactgcctgtctcccattttggggggcagtggtttgccctgtgacctcacttctctgacagatctaagaaaagttgtttatttttcagtgtgctctgctttttacttgttacgatgaagccaaccactttcagaatttctacaaaccagatcagaatctggaagtcctgtttttttattttttttatccctttgtttagcatgttacctatcttaacacattttaaataagtgaatgcatagcttatatctacttctaggttatatgcttccttagaataggaattgattcttaaaatgtcgttctgctcacgcctgtaattccagcactttgggaggccaaggcaggcggatcacttggggtcaggagttcaagaccagcctggtcaacatggtaaaaccctgtgcctgcaaaaaatacaaaaattagctgggcatggtggtggccatctgtaatcccagctactagggaagctaaggcatgagaatcacttgaacctgggaggtggaggttgcagtgagctgagatcgcgccactgcactccagcctgggtgacaagagcaaaactccatctcataaataaataaataaataaataaataaataataaaaataaaaaaataaaataaaacaaaaattttattctgagcagtctctgaagaatataaattctactgccttgcctttagaacttataacagcatctcgcaaactatcacaagatgctccaaacatacttcttatgtgctgaattaagaagtcaactcaaatttagtatactagtaatatttttggatatcccaaaacactgccagctcagctttaggctgcccttcttgggggggaaaaaagcagttgaaatttaggacttaagtgggcatctcgtttaatttttaatggatttctatgttgttggttatggtgaagaggtgaaaagaataaatattctgtgcagaaaaattattcagtcttcatgtgaaaacactttgtccatagcaattactttatgaaaaagatgtggtattactttctttgctcttaactgagacctttaatttaaagaacctatactttacaagtttttattttcaatgcatgaaaaatgtagcagctatttcacaacctttacttttaaaatccatttttctttttaatctcaaatagttttttcttaaaaccttttgactttttatctaaattgtaatagccagagcaccttcccacaactagaatatctcatcctttttgtcttttctttttcctctcaaaatgcctactgggaacttaatttggagtcagattcttcatgataaatctggacttaatcaaaattcctcatatggtatattgtatatatcacagtactggatagtcctctgattaaatagatatttgatagtactttaaggtctatacttttggatgaacttaactgctttctccatttgtagtctcttgaaaatacagaaatttcagaaataatttataagaatatcaaggattcaaatcatatcagcacaaacacctaaatacttgtttgctttgttaaacacatatcccattttctatcttgataaacattggtgtaaagtagttgaatcattcagtgggtataagcagcatattctcaatactatgtttcattaataattaatagagatatatgaacacataaaagattcaattataatcaccttgtggatctaaatttcagttgacttgtcatcttgatttctggagaccacaaggtaatgaaaaataattacaagagtcttccatctgttgcagtattaaaatggcgagtaagacaccctgaaaggaaatgttctattcatggtacaatgcaattacagctagcaccaaattcaacactgtttaactttcaacatattattttgatttatcttgatccaacattctcagggaggaggtgcattgaagttattagaaaacactgacttagatttagggtatgtcttaaaagcttatttgcgggaagtactctagccttattcaacagatcactgagaagcctggaaaaacaaatcccggaaactaattattatgtgccagttatataaacaagaagactttgttgggtacaaaccagtgattccttgcctttgaaaaatgtgtcagatatcatgcattaccagcagttcaatgatataaggaaaccagagtaatagctaaaacctttaaagctaaaccaaagatttacaaattgcctcttcatccagtctttcccaacctaaaaactgagttctctaaaaattttagtatttttttctgaagaaaagggaacatggacatttatctaatcctcattagaaatctgactaatgataacaaggatttagacctcaagcacttcttaccaaaattcttgatatgaccttatagcaaattactttcacctgttgaactttcctttcttttattcccctgtacctcacctgcactgggcatattcaagttgcttatacaacactttactattgtgttagaaaaatcatgacacatgatgaatgtgtttgtgcaacatgagctgattcataaatgaaaatgtgcattgaaattccacaatattttaaaattaggagtttatctagcaattgaacaaaattgattaaatccattatttgttagatcagctaaattacataagttcattcatctgctcataaatccatccattcttccatctggctatcccttagtcaattcaaataaatatttatggggcactttgggtaagccaggtgctaagaattcaatgcaaaacaagatagactcccctgtccttgttgaacttatatttttggtacaaacaaaagcaataatcaagaaaaaataaaaaaagtactgattgtgattaataatatgaagaaattcaacagagtattgtacttaacatttgattgatctgattttctcagttgtctgagaacaaacatttgtgaaaatctcattgtagagttcttacgatggatagggggtcaactgtgtcattattgcttatcagcttatcccaaagacctagtttattaccagattgcaaatagtgttcaataaattattcttattaagggttgttatgtactctaaaacatttattgtggtcccttcactggttctggtttacaaacttacttttctatgatgacatagtatagaaattgagagtgaatatttagaagttcatttttattatatatttttgaagtattgatatgtagtgaattagaaatttaaaaagaaaacaaaactgtccttcactacagattgaaaagcattatactaaaagaccatttgctcagttatagtatataaaggccaaatgacttaaaaacaaattatgtaaggagaaggaaacaaccatttattcagtgccactaactgtcagccagttttttcagtggtcagttaatgactgcagtagtgttctaccttgctcaaagcaccctcctcaagttctggcatctaagctgacatcagaacacagagttggggctctctgtgggtcacctctagcacttgatctcctcatgcagtgcatggtgctctcacgtctatgctatgttcttatggtctttaggtaacaagaataattttctttcttttccttactatacattttgctttctgaaattcccttctcgccaatccaggtgaatgtcagaatgtgatttgacaactgtccaaagtactcattcactgaggagtggtaaggccttcgcccaacctgccttctctgggaatatactgctgcctgaacatatcattgtttattgccaggcttgaacttcaccaaattaatttattagggtcaacatctaaatattagaactatttcagattaatttttaagtcgtatccactttgggtactagatcaaattgcaggtctctgcttctggcttgagcctatgtttagagatgatgtgcatgaagacactctttgcttttcctttatgcaaaatgggcattttcaatctttttgtcattagtaaaggtcagtgataaaggaagtctgcatcaggggtccaattccttatggccagtttctctattctgttccaaggttgtttgtctccatatatcaacattggtcaggattgaaagtgtgcaacaaggtttgaatgaataagtgaaaatcttccactggtgacaggataaaatattccaatggtttttattgaagtacaatactgaattatgtttatggcatggtacctatatgtcacagaagtgatcccatcacttttaccttataggtgggcctcttgggaagaactggatcagggaagagtactttgttatcagcttttttgagactactgaacactgaaggagaaatccagatcgatggtgtgtcttgggattcaataactttgcaacagtggaggaaagcctttggagtgataccacaggtgagcaaaaggacttagccagaaaaaaggcaactaaattatattttttactgctatttgatacttgtactcaagaaattcatattactctgcaaaatatatttgttatgcattgctgtcttttttctccagtgcagttttctcataggcagaaaagatgtctctaaaagtttggaattctcaaattctggttattgaaatgttcatagctttgatagtgtttttcagaagaccaaatttacagtgggagccttgggcttttgttttttaacagctcttttttgttcctgcttcagtggcctgacctccaagttagcaatcgccaggttgagaaatgctttgcgagacataacagatgctcctgaaataacaaacacttggaatcatgaggtagtggaattgaaaatagaaagtgtagtgattgttttttgttatttggatgggatgaacaatgtcagattagtctgtaactatttttttttaatgtcactctgatttggtcacaaaggatctctagtctcattgccttagtatcattctacgaattagaatgtgttactgtgtaagagcacttcttgtatatgagagaaatagcaacagttccagtttaaagtgatataaatggaaaccaagaaatgtctttactgggaccaaatctggacagcatttactgtatttttgctggtattttctctagtctttccgggtatattcacatttaatgatcacttttctccctttgtgctaatggacactgaatccattccactaccatagttcttgctaatactactctactttttacacaaaattaaaatgccaggagcacctccaggtagactgactataaatctagactgaaaaaaaagcttgtatttcttaacagattaccttgtggaacatttgctcctttcaactaatgaggcactaaatattgtaactgctcaactggtgcttttaatttatttgtctagactttgtcatgttgccagaagctttatcctggttggagttttgaaaacagtattgtttcttcagaaagaaaaaagggattgtcagatgatctaaaaataaagaaacactggaaatacaagtatcccaaggtgatagcattaggcaagataaaaatgttgaaaagcgaaaaagaactggttgatagagaagtgttgttattcagtagaacctaagtcttgtggtcccatttttaatgaaaaatggtgaattttttggtttttattgttcttgttcacacaaatctgcccattagaataagccaagccctaaaaattaatttcagtttcactgggaatcctttagtttatctactatgtagtagagaggttttgttttattgcatgtttgacgtaggaacgtatatatgcaagacatggaggaaaaccaagtgggccagagttttgaaaattctttatcttttctttctgccaaagtgagtctcccaagtttgtcttttttttttcatttccactcttctatggtttctagcattatataaaccaaacaaaaaaaatacgttcagagattccttcagaaatgctggatgatcttgatatcgatgcttttcatatatgtgtttatgatgctggtttctggggctggctctcagtatcacaaagatgtctgtaaacagaatatgctatttcttctttgtgacaaattttgaacattatgtgaatgtccaagaaagagcaaaagagggcaaacttctcatacatttttgatgtcgaaaccaagagacgcttttattttcctaacttttctttgaaagttcaaattaagtaattttatcctgtcctaaagtttaaaaagaaaaaaaaaaggaagaaggaattaaaaatccaaagaaaattatgtttgtttgcttttctgtttttttcttccttccaactccgagactttgcaagggcatagttctgaagatctctgacactgagacattagagatctctgtatcaatggatcatttgttttcagacatatgaaacaggaactttgaacaagaaatttcccctctttttctcatagtgatcctgagacatcagctgtggaatcacaacacgtcattagttttggcaggtccttgcaggtgttttgttttgttttattaatgttcttccctcctgtagctagacagcaatcttggagaatctgccagcttggaagactattgtgtaaatttcaaggtggagcctcctttaatttgttctgtgttacctgtgagctgtgaggtcatgaagaggagacaatgaggctaatcatgagagccccattggtttaggcaattagaacaacaagatctaaaatggtttattagccttgaattgtgttaagcacataattcataaaaaacagaaaaaatatttttaaatgtatgtctaaatcttcagttacaagtttgaaaggtgacaaactattctgaggaaatgattaggcctattcttgcaacgagtctttatgatctgaaaagaatctatgtccacacataactcccacctcaaagatggggcatcttttgctctgggagatatcaaatgcgaccaaaacaagtgtttgtagatttgaatgatgattcagcagtgtagcagttctcactcattttataataattaacaacttaataattaattattaaactcctacatgcttaacattataagtatgataacttctgtggttacataaaagatatacatagcacttgtccttgatctgtcacagtgaggtcccaatccaacctatgagcttcaaatgaaaagttcaaaattacactcattgtcataagtcagagatcaaaggaagaaaggatttaaccaaaatgataaattaaatataggtgattaaatatagtcatggttcaaggcatgggccagttagggagtgtgatgtgggtaattatgaaaggccagctcccaagccctgttgttgctactcccccacatcagtcatccttcctttttttctacttctactgcagtgccttcctcatcttttcccttgcatccctccattatatgagtcatacaaattagacttttcaaagcaacattaacattgtgtgaatttggggtttttgactaatcccaacattccacccccacattccagtcccacatgggatttggagccttgtttataaacctggcacttctaatatatcttatcttagagtaatccttgtatttgtttaatttccacttagcattgtaaatacttgcaggtatcctagttaagaaagcaaggtttaaacacaaaatcatcaccaattaaagcaggctagataaagaatgtaatagaaatgctagataaaacagattttttcttactaagttttctgtcccttatagagtgcataacacaataacttgcttgataagaattcaatgtacattgttttgtgctgaatcactaaatgcttgatttctgtaacaagagattgtggttccatcagtatctggattttagtctgtgtaatcttaggcaagttatttgatttctctgtgcctctgttttcttgtctgtaaaatgagtataatggtagtaactaattcattgtgtttttgtgaggattaaatgagttaataactagtactcctccctggcacatagtaagtacaatatgctgtgctgtggtggttgttattattttttatagttccttgagcaaaagaaataatgtccccatcttagtataatattggaggtatataccatagaagtgaacaaaagaatatagtttcacaaagaaagtgataattaaggcggttcataaagggtcataaagcttgtagattttagaaatgtgggggcatgaggatgtggagagggtattccaggatgccagacagggagattatggatgagtactaagatgagaactagaaaaagctgaggggcaaaaggtcagaggaggccacaagttagggagtattaggaaaaagaagttaatacttgacaagtgccaacatggcttcacgaggaatgggttgggcctttttgagtgaggaagaggctggtgaaagggtggtggaggacactgctgctgctgatggcatggggtgtaggtggcaggagaggcagggacatgagctaggaaactctccagctatgaagtgatgagtctggagtaatataaggacagtaggggtggagtgctgaacttaagggaggagagaaaaataattggtatggaagtaggtacaatgcaattttattatttctgagcctaaaaatgtgaaatttttgattatttggtcagaccagggaagtattttcttttatgctatctctgaaaatgtatacactaaaaagttgtagtataaaaaggttgtaaagcattaagtaattttagaggaaacaataatttggatattttacatgcaatcatttatatgcaaatatatgtaaatattacaaaattattctctatttgttacaaaccttaaatatttttgactgaggaatattttattcatctaattatagctactttgttctaactaatagatattcttgaaaacaaagcaacacttttttggagacagagtcttgcactgtcacctagacttgagtgtgttaccttgaactccagggctccagtgatcctcccacctcagtctcttgggtaggtggattacaggcccacactaccatgcccagctgtattagtccatcctttcattgctataaagaaataccggaaactgggtaatttataaagaaaataaatgtaactggctcacggttcttcaggctgtacgggaagcatagcagcatctgcttctgaggaggcctcaggaagttttcaatcatggtggaaggcaaataagaagcaggcatgttacacgacgaatcaggagcaagacaaagtgagggaggaggtgccacacactttgaaatgagcagatctcatgagaacagcgccaagaggatggtgctataccgttcatgagaaatccacccccatgatccagttacctcccaccaggccccgcctccaacactgggaattacaattcaacatgagatttgggcagagacacagatccaaaccataccaccagctaataccaaaaaaaaaaaaaaattttttttttaagacatggtcttactatgttctacaggctggtcttaaactcctggcctcaagtgatcctcccaccttggcctcccaaagcactgggaattcagacatgagtaacagtgcctggccaatacttatttttaaacattctctaccataaacttaggatcttgatttgttcacattgaacagatttttattatacagattgaatttataagaaaatgttgcagacattgtcaaaaagggacgtccaaaccactgtgatatttataagcatttgggccacattttgatagaactatacacggagtgtgtgtgtgtgtgtgtgtgtatatatatatacacacacacattatttatatatatgtatatatgtatatatatatatgtatttatatatatatgtgtatatgtatgtacacattatttacctacctactgtgtgagtgtgtgcatatatacacgcacacacacacacacaaatatatatatttcccttctgagacaaagccaaacagcactgtatgcttaaagaaaaacagtcacacttcccacttatgtaatttatattacatccagtcaccacaccagccaaactgctttattgttttttgtttgacatccaatgctaaagcataatgcctgttgcagtgaaatatacatgagcaaccctgagaactcaatatagcctcacgtgttgccactgagttgagttgaggagtcaagctgtagcaaaaaggtttgtcaccgggtgagtaatggtgctcttatttttctctgggtctcaagaagtgctctttatgacatatatggcattaaataaatatcagatatttgcacatcctaactttcctattggtgaagtttcttaaaagagagataaagggccattgtgtgattgatagtttcaggtatatttttgctgcacagtcagtccgagtgtaccacgtagggcaaaccacgtaacttctcagggccttgactgtttcatttgtaaaccagagaaaaggacttgggtgacctccaaagacctttcaaatttggagatgagtttgtggaaagttcaaacagtttagaaaacagaactaagacacccactggcacccctggaagcaagagagtgccaggtactatttgtaatacaggaatgaaatacctaattgtatgaaattgaattctaactgaaccagtttgttcagttaaattttttttttcaattagagtgcttacttcagtatctaacactagacagtaaactgtagacaaaagacctacagaatttctgaatggtatcaaattcaccacacttaaaactttgggatgtctaatttcaaccaacagctttctttcttcataatgttgaatatatgtgtatctattttagctaaatttaatatatatcaatatactttgatagatattttatataaactattagactatagtattatgagtaaaagacccaccatttcccaagcaattataaagaacgatcaaaattttaatgggttgttagtattatttctttaaagattgtgatactgataaatatttggccacattttaatagaattatacatgggatgtgtgtgtgtgtgtgtgtgtgtgtatatgtgtgtgtgtatatatatatggcagtagagatatatatatctacacacatctagatatatatatacatgtatatctatatatacacacatatatctgtgtgtatatatacatatgtatatatacctacatacatatgtacatatacatacatgcatatatctgtacatatatatatagtgtgtgtgtgtgtatatatatatatatatatatattttttttttcctgagccaaaacaaaatactaggttgtaatagctgttctttcagaaggaagaaaaacaacatgtgctgaactctgagtttgatgtttttgtattttacttcctattttcatatcagtccatttatttattcaggaagaatttattgagcatatattatgaacacagcttttgctaaggacagggtatgcagcagttatggcctagtaggagatatggatgttaaaaacaaaatgctcacaaatgcacatataatcttaatactcattgtaagctatgaaagcagagtgtgagtattatgagaccatatgttgggagattttatttggtattgaggatcaggaaagatacccctgaggaagtgatatttaatttgaaacctaaagaaagcagttggccatgggaagaaggtagggaatgagattcccaagcaataggaatccaatgtgtgaagaagctgagggagtgaaagaaagctagtgtggtggcaggaagaaagagaagagaatggagaagggcactaaatgagtcagagaagtaggaggggctaaaccatgtagggtcgtgtaggccatcttaaaggcctgagtgtagtggaaaacctttgaaggtttgttaaaaggtcaatgaaatgttctaatttctgttgtagtgaattgctttgattgctgaatgcgaatggatgggtagagatgcaagagtgaaagggaagaaatcaattaggaggctcttgccctgctccagataggactgataattaattttatttgggaagatcagggagaaagataagtcatgaatgactcccaagtttctggattgaagaaatgaaggtaccatacactgagatgggaaagcctaggggtagagtagctttgagaagaaaggtagcatttccccatttcataaaacatggaagaacaaagaggctggattcctgtttgtagacataccttccaggccagaactgcattactacaacatctttgcaagccacattgcctttcataactctgtgtcagtgttgatgccgtaacatctttggccttccccctaccatcctcccgcagtcctccatgataatgccattattccgtttcaaattgtgtgcttccattggatgtgtgagtctccttgaaagttataatgaggctgtagcccatatgaaatgcttcaactcaggtcctgcataggaagaggaagctaatctctccaggaactgagcctgtggctagagggatggataattgtttaaataaagaatatgctgctgagtactgatgggctctttatgtacccatttggctgctgctgcccaacctttaatctttcctgagctttaaataggaaggaaaaaatggtccacaaaggatttgagccattttgctgtggtgatgaggagcacgggtttagagacaaacactcctgtgtttgaattccagctcctactatctcctagctaagtgaccttggacaagtcacttaccttctccaacctgctgtttcttcatgtacgtaataggatttacctcatgaggttgacatgaagattgaaagaggtaacatatagaatgagcctgtcccaggacatggttcatgataagtctgccataaatgggagctatgtgtcccacccttttggaggagataactgttctgtagcaggtaatatattgtttgatacttggttaacccttacaattatcatttcctgttcttctcaataatgctagaaaccttttatttaaagaaccacaatataaaatgaaaaatatataaaaaaagcaaatggaaaaattctattggcaaggctttttaactttatatactaaataaatccaattgcttaaataatgaactgactcaagttctcagcactgcttcttgtttaattctctttagtttttcagaattctccaataatgacctttgtctactctcttcagtttattcagaaattacttttatttacatagaagtttggaagtggatacacaaacatatccctcacatatcttatgatcctatgagtcatatactcatctcttatattccctctgtaaagcaatgtaggtacctttcaggaaggtgatttttatgtaggttgagaaatatcagcatggaggtcctagctgacctctctagagagtttctgagacatttgacaacaactttttctttaagtcatcagttatgccccggggtatgaaatttctaacatgatcctcagtaaacttggctgccttgctgaggatactctccatctgcctgagagacacagacaccattaattgggaattgacttgacttgtgtggttccttgtggaccagatggccactaaatattctcatttcaaggcaattggtaaaaactacacttcaagaaatttcattcttaattccccttagtggatgttattaaccaaaggcaaaagaaaaaaagggtaaaaaaaatattctaaatgttaatatcaaaaatattattttcaattcaccccaggcacagagaactaagtattattattgctattgcaccggcattccccaatgagacagtgattttcttttaagacatttttaaataatataggcagaattaagtagacggtgatctggtaagtagatgtttcagggtaacagctgtgcaatgctccatgcagggaattagattgtcattttattccttaccaggaacatacattcagttaaacaattatttgacttctgctcttccactgatttctaagttgaggctctctcttgtgcctgtctgatcagataagtagagttgtgccttggtttatagatgagataaatgtgtatttgaataagcataagttaaagaaattttaaaatcccttaggaagctaggcttatcagagaaatccaaggaaatacattaacaaactaggaatttgttctaacaggttaattataactcataaacttattgggtttttttaccttttaattttatattacatttgcttataataaggaatattgctaggaataaaattttttaatattctacaattaacaattatctcaatttctttattctaaagacattgggattagaaaaatgttcacaagggactccaaatattgctgtagtatttgtttcttaaaagaatgatacaaagcagacatgataaaatattaaaatttgagagaacttgatggtaagtacatgggtgtttcttattttaaaataatttttctacttgaaatattttacaatacaataagggaaaaataaaaagttatttaagttattcatactttcttcttcttttcttttttgctatagaaagtatttattttttctggaacatttagaaaaaacttggatccctatgaacagtggagtgatcaagaaatatggaaagttgcagatgaggtaaggctgctaactgaaatgattttgaaaggggtaactcataccaacacaaatggctgatatagctgacatcattctacacactttgtgtgcatgtatgtgtgtgcacaactttaaaatggagtaccctaacatacctggagcaacaggtacttttgactggacctacccctaactgaaatgattttgaaagaggtaactcataccaacacaaatggttgatatggctaagatcattctacacactttgtgtgcatgtatttctgtgcacaacttcaaaatggagtaccctaaaatacctggcgcgacaagtacttttgactgagcctacttctctcctcactggtatggctccaaccatcaggccctatcttggtccatttaggctgctaaaataaaataccaaagactgagctgcttataagcaatctttggaggctgagaagtcaaagatcaaggtgccagcaggtttgctgtctcgtgagagcatacttcctggttcattgatggtgctttcttgctgtgtcctcacataatggaaagggcaagacctctctggtgtctcttttacaatggcactaatcccatcatgagggctttgttctcatgacctaatcacctcccacatgtcctacattctaatactatcaccttgggggttaggattttaacatatgaatttgaggaggtggcgggggggacacaaatatttagaccatagcatttcactcctgacctccaaagttcatgtcttcttcacatgcaaaatacattcattccatcccaatagcccccaaagtcttaacttgttccagcatcaacttacaaggctaaagtccaaggtttcatctaaatatcagctaaatcagcacaaacagctaaatcaggtagagtgggacttaaggtgtgattcctctttaggcagattgctctccaactatgaaattgtgaaatcaaacctattatgtactttcaaaataaaatggtgaaacaggcacaggctagacagtcccatttcaaaaaagagaaatagaaaagaaaaaaggagtgacaggtctctataagtctaaaactttaaggcttgagaataatttgctttgctttgcctccaggctcactggggtggtgtcttacctctggacacactggggtggaggctctatcctcatggatttgagtgtctcattctttgtggcaggtctgtgctccaatcccacacctatggctccctgagtgtgcaattgcatgcctggtggttctactggtctgggattgcataggtggcccagccttcatagctccactgggcattgccctaatgtgggctctatgtggtgacctcacccctgggcctctacctgggccctgtgactccctgggttcttgaaatctaggtggaggcagccatccccctacagttgtgctgagtgtagtgcatgagtgctggggtctgctagagctatacctagggtggtggagatgtatggcaatggagtatggggagctgatatggtttgggtgtgtccccacccaaatcttgtcttgaattataatttccataatctccatgtgttgagggagggacctggtgagaggtgactggatcatgggcatggttttcccatgctgttcatgtgatagtgagtgagttctcacgagatccaatggtttcataaggcagttttccctgctcttgcaccctctttcttgcctgtcaccatgtaagacataactctttcccttccgccatgattgtaagtttcctgaggccttcccagccatgtggaactgtgagtcaattaaacctcttttctttataaattacccagtctctttacagcaatgtgaaaatgtgctaatacaggagcaaagactgcagtgtgaggtggcaatgtgaagtctgcaatgtgaggtggcacggggcagttgtagcccctcctttgaaatctttcttccctaccccaggcctctgcactctgaactatgatgggaaaggcagcttggaagatctccaaatggctttggagtcattcttccattgtcttggactataaattctggcttctgtttaggtggctgactaatatccccactgtctgaatgcatagcacctagtttctgttgagatggctagtccatagtaatttacttatcaaatttggccacaccctttgtattctctcctgagcaggctttctcatctttcacaatatggataggctgagaattttccaaattttgaagttctgcttcccttttgatcaataattccattttaaagtcatttctcatcttgaattttactatgagcagtcaagagtaactaagctgctccttcaactttgcttggatatttcctcagtcaaacattcaatttcattgctttcaagttctgccttccacaaaacactaggacacaaacagctcagccaagttctttgacattttataagaaggatagcttttcctccattgtccaataacatgttcctcatttccatctgaaaacccatcagattggcctttaccgtccatatttctgggaacattctgctcatgaccacttaggtattcggtaagaagatagtagctttctctatagctctcctcctctctggagccctcaccagaatggcctttaattgtccattcacagcaatgtaggctttttctagcatgtacctgaaaactcttccagcctctactcattaccttgttccaaagctgcttccacattgagtatttgttacagcagtacccagatcccagtaccaatattctgtcttagtccattggggctactacacgatgtcttataaacaacagtaaaatttatttttcacagttgtggaggctgggaagttcaaaatctggtgccagcagattttgtgtctggtgaaggccttcttcctcacagatggctgtgttctcactgtgttgttacatggcagaagagtgggcaggctagctctctgggatgtcttttataagggcagtaatccaaatcatgggtttagggtagagccctcatgacctaaatcacctcccaaaggccccacctcctaataccagcatctttgaagttaggatttcaacatatgactttggcagggggacagaagctttcagtttatagcaaaccctataggtagcactactttgtcctttcctaatcaatttgcgtcaatgaaacatgaattagaagagacctaggcgactccactatactgggattattcccagtataaattatcatctctccacaccttctcatctactccctatctgagttctgaagctctccactacaagaaggaggctttggtttgacttgatatacttctctgggaaacaggtttagcataaaacagtgatgctcattctagaacacctgcaaatgacaatagttttctttcgaagtcgccaggaatcgtctgcctttgggtatgtggctgtgagcactgccgggcaaaatgccatatgacctagatgaggcatatgccatcctttgaagccattaggacattatataggaaatatattaactaaaatggaataaaattttctaaataacaccttatgtttatccaacaggtggttcattatacttgagagcattatacagaggaatttgatggggaggagagctggagaaattctcgaaattctgggtttctttaacagaatactctagctataaacttataattttaaaaaataagcattatattaaagaaaagggaacataaattattttgttttattaaacttaagtccaaaggtctggattgtggcagaataggatcaggggacctaaaatgttgagcctcaaaggtcttcttagagaacaactgtattccactattagcgcttttggtccttttagcccaatttctgtttatcccaaatgttcttcccttttctgccttccttcacagtggaccctgccaggagctttgaaatgcctgtgagtgttaaacacttacccattgagtgcccaaccttaacatgcccctaataaaatgtacttagattaaccgttttcattatcaaagtttccttattacccaacaaacacaggcgctttaaagaaaacattaactaaattgcaagtgacacattttaagatctttgatatgacttcagagaatgcactataggaacacaatgcaatgggagggaaacttgggagggaagacattagcctttataaaatctgcaagtattgccaaatcaaaataaaatttacaggaaagcaggatcataaatataatctaaaatcttagaacctgtggttatgattttaaatactaatacaatgcaaaatttttacctgtttaggtttttatttcatcagttcatatttaggtatatacttttactgttctccttttttataatttaccattcacaaagatgatgatgttagtctaactttaatgtcatgagtgctttgagtagtagtgctaagtttttgttgagtagtagtgtgcttttttgattagtagtgataggtttttgatgagtaagcctgctagcagcatacaaacaaacaagcaagtatcagcctagagaagcagaaaaggcatttgggtttcaaagtcacaaggcctaggctttagtctaatacagctgataatacaatttgtccaaacaggacatttttgggtgtgtcaaacactaaactggacaggacattatgacaaaagtgcaaagcaggactttccggggcaaaccaggatgtatgtcatctcactgagtcctctctttgtccttgccatgactagtatctctagaggtaaatgaacagagtaatgacaaatagccagacacctgaatcttatcccaacagcacctcctacataattccccattatcccaaatggaaattaaaaatatatacagtgataattccaggccaagaaatgctttatttctagcttggacttggcttccatgtccagtgtagaatcttatccttgctgatctggactgtatctcatgaagccatgacttgtacctagttactagctggaaggcttagaacaaaagctggtccagagagcctcctttttccttatttcctgggtccacacctttaccatggcagtctgcctatcatttgatggaggaatttaaagcaagtccaagggaagggaagagagtttctaaaatctagaacttggatagtttaatttacctatcccaaaacagcttaggcccagacagcttctctccaagattggtgccaaactgaaattaccagctgtgtagaccaaagagaatttcaaaagaaactgaatcccaagagaaaaaaaaaagacttctggcattgtggcccaataaattggtaggattgttgtgacttttcaagtttacatgtaaaatgggcccagcgcagtgcctggcaaatatgggtactaagtaaaagtaactataatcatgtttttttaatctggacttcacttggtcatcctttaaatggtgtctgacagaatcctagttcttgtctcactttacttagtttccctgggaaatttcatgtgtccttttggctttaattaatatctctattttgatgacctccattatctgcctattcccagagctttccacctgatatctcagcacatgaaaagcaccttatgtcaataagtgagttccttccctgccccaccacatacctgtcctgtgttcctaattccactgaatggcatcccatcctccagtttcccaaggccaagacctgggactcatctttcactctcaagttcctccacgggtacccacatgtcacatcctgtcaatgctgtccctggggagtatctgaaatatattcacttttcttcatttccacctgacaccactattaacacttgcacaaatttctgaggttcctggctcatttccctcattgacccccaatagttcattctgctctttgcagctctggtgatctttccaaaccccacatctgatcacttgtttcttcccttcatatggctccttaatgccttctggactaagtccacactgcttaaggtggcttaccaggtccttcatgattttgtctttgtttggctttctacactcactgcccaacttccccttacttcccatgattcagttatactgaatttctttggttctctaaagcacatgtgctttctgttctgcagaggcttttttgttcacttgctattctctacctgggaaactcccccagcccttcactgcctccttctaccatctttcaggcctctccttacacatcacttctttccaaaaatctgccttgacactccaggtctcggtttcctaggtgtaccctataactccacccctttcatagcatttctcactctggctggagatttaccttttaacttgtccatgtcccccactggagtggaagttcctggaggtcagggattatatcctattaattgttgtatttccagtgcctagagtagtcttgcatacatggatggtattcaataaatattggttgaatgaataaggagttctttcatttcatatgtaatagatcatggaaatagccttgtgattgatacacagcaggtattaccatcctcactttagaatgaggactcagagccttgagatgtctgagggccttgactgggacagctggcagatgcaggagcagagctgcatcacccctgtgggctatctcagggttgtctgtaatctaagtacaatgtctgttgattttggactgaaggctttttgggtaattgtttgctttttcaatacttataaaatagtttccatccttactcattgatagtaaggttagttattttagaaaacaagctaaatagcagaaatagtggccttttaagttgaaaatttaccctgaaaaatctacagagtagcaaacagagtatcaaaaggagttgactgtatctatttttataactgccacttatggattattcagtaaaaccacaattcacttttatgattttttttcatgtttctctgtcacaagagcaaactcttgctccataataacattccagaatacagcaatagcaaaagtcaacattttgaatcctttacaaactcttagacatttttttttttttagtttaacatgttacaaaacaaaatttcttcttttttcacagcagtttgggaagtacatactatttattagctcatcagcatgaagctggaaaattctttttcctaaagttctttatatctacaaactgttgatgttttcatttatttatttttaatgctacgttgtaatgaaaatcattggaaaactttagattctagtaattttgaagtcttcttagtttggacaggactgagctaaagtttgtactttttttaatttattgaaaaatggtttctaatgatagtattaacaagattatattgggggcaggacgcagtggctcacacttgtaatcctagcactttgggaggccgaggcggttggatcacctgaggtcaggagttcaagaccagcctggccaacatgtagaaatcccctctccactaaaatacaaaaattagctgggcatggtggcaggcactgtaatcccagctacttgggaggctgaggcaggagaattgtttgaacctgggagtcggaggttgcagtgagcccagatcgcaccactgcactccagcctgggcaatagagcaagattctgtctcaaaaaggaagaaagaaagattatattggggatatatatgtgtgtgtgtgtgtgtgtgtgtatatacacacacatatatatatacatatatacatatatatacatatttaaaggataaaggattctgctgccacagatcactaaatcagatgatctctagcaatttcctgtttgtttgttttttgcccatagtgcttatctctttgaacagtaattttccacttactatttttctccccttttggaccataatttcctttaaggcagagcctcctgttactcatctttgaatctggggtctgtcagagtacctagaatttaataaactctcattaagagccagttgaaagaatatatgactaagcagtcatttacatccaaaagatccgtaggagaattcttatcagcacatgtgattggtaacaataactttgtacttttcaaaaacaattactaatctatcttgctttccattatctcaccaaaacctattagcatgtctggcagaaaatagatacttaataaatttcttaaatgtttactgacttcaattttaagttttattaactatgttgacttttctctaatgaagatgattctaaaaagctttttactatacttcacagtgaataaaacagtgagataggaatattgcaaaatgtcccctgtgttggtcagtcttagtgtcattcattttaaaaattctgttctctaaatattgacagttatatataaatttatgtaattgtttacttctaataaagaatttcatctggggaaaaacatactttgctcagctctttgccacaagtgcaaagtctaagacagtcaaatagctttcctagtacggccttaggaacttagtatatgactggtgtgaatctagagggagcatactgcattctgaccaaaatctccaccctgttactatggccatcactaacttcgcagtattgcagtacttcctgctagcttagttcccaaggcaacttgtgaaggaaaatttttacaaagctgttgtcacacaaaggtagtgtttcagttcctgagcccatgtccttggagttgcccaggctccaataatactaataattactgtacattaggtacttaccatgtgccatattctgtgggagccgctttccacaaattatctctggtaatccttgtaacaaccctttgacatcaatattattattttctccatttttttacatatgagataaatgagacttaaaataatgtgcctgatatcatcagcaaatgagctgaggagggcagattcaaagctgattgtgtttgactctagagctgcagtcttaagccagaccttttcttgctggttaattttactgaaaaaaaaaaaaaaaaaaaaaaaccctcaaatactgctgattgatctaaagtactaacatttctatcagtgttagggaaattttaattttataatttgattttgtgagaaatttatagcatcttgaatactcacatgcaaagtgatatgtcttagataacattttacaatggcagagcttaagccagtgctcagtcattcattcatcctcaagttttgattcatttatcattcatcaaaactctgttttgtttggccacccacattctaggagctcagtacatatttgataaatgaatgaattgttgaggttgacagttacccaggactggcattaggaacacagagctgaagagcacgtttttaccctcaagaagcttacagtctaacgagggaacttgcacaaatactactatcactaggtgcctggttgaatggcttaagagatgatcagggatattcagaaggatatgtcaggctcagcaatggcatcacttgagagcatcaaggtgtttagggaactacaagatgtttggttctgctgggaataagagtgaagggggctccatttggatgcctcatacaccaggtgagagatcttagattttattccaccaggaggagaactaccataggatttaaaacagaaatgatatggtcaaacctacatcttaggaagatccctggggtgtttgtatggtggacttgcaatttgactaattgagatttgtaggatgattcttaagagatgatgatgacccagactgggatcactataatagagttggtaaggaggagaatgatttaaaaagtagttggaagaattctagggatggagataaacatttgaaaattattaacttataggtggtcatcaataccctgaaaatgactgggatctcagaggagagtctggagagttggaaatgacaaagactaatattcaagggggcaggaagagggagagttgttcacacatgacaataggaagaaatggccatagagtgtgtggtttctctcaagccaaggaatagatgttttaagaaaggaaaattcttgtggtgggaagcagtagagatgacagatacacattaatttcttgagatttctagatgactaaatgggcagatgttgaatgatagctaaaggagaacccagaaacaagggagggattttgtttttgttttttaaaaaagatagaccatagcagcttcatagactgaaacaataaaaaagttgaaggcacaaagaaagacacaggtcctctaactccctgcccagtgccctttattcatattctcagcacttgtatttctaagttttatgtttgagtcttcggggatacatcagagtagtcccccttgtctaataaatgtgtttacatttcctgccataccagaaacccttctcaaactttaatgaatttctacaaggtgagattactttaatgagaaaccaaccaaggaaaggagtatcatctgcaatatactttcaaatgttttttgcttgtttgtttcttgtccagctaaaaaaaaaaaaaaaaaacaagccattggtcctaacacaactttcatattctaccccaatatcaaagaggcttaaaatctcctggtcgtgtgatgggcacacagttaattttttgtgaacaaacacagtgttatgggccatttctgaatttatctctgaaatcataagattctttctgagccattatctcattctatattacagtcaggtggagcccatcttacctcctcatactaaattctagacttctcaagggcaggagacaatcatctgtatatctctttggccttcatacactcaggagtacttgccaaaaataaacatttaatgcacatttatttgaataattgataagatccaatacttcaataactttgtcatatttttatagaatgggtttctatatctcatttgcattttcaaactttacttttactgtctagctttaaaaaaaaagcctttgactctaatacagccctcatattctaccccaatatctaagaggctttatatctcctagtgttgtaccactattttaactccagtattttttacttcatagttttacctatttgttacagttagtttttatgaattcaagagatgaatagcaattttccatatgtaatttaaaaaaccccacagttgactattttatgctatcttttgtcctcagtcatgacagagtagaagatgggaggtagcaccaaggatgatgtcatacctccatcctttatgctacattctatcttctgtctacataagatgtcatactagagggcatatctgcaatgtatacatattatcttttccagcatgcattcagttgtgttggaataatttatgtacacctttataaacgctgagcctcacaagagccatgtgccacgtattgttttcttactactttttgggatacctggcacgtaatagacactcattgaaagtttcctaatgaatgaagtacaaagataaaacaagttatagactgattcttttgagctgtcaaggttgtaaatagacttttgctcaatcaattcaaatggtggcaggtagtgggggtagagggattggtatgaaaaacataagctttcagaactcctgtgtttatttttagaatgtcaactgcttgagtgtttttaactctgtggtatctgaactatcttctctaactgcaggttgggctcagatctgtgatagaacagtttcctgggaagcttgactttgtccttgtggatgggggctgtgtcctaagccatggccacaagcagttgatgtgcttggctagatctgttctcagtaaggcgaagatcttgctgcttgatgaacccagtgctcatttggatccagtgtgagtttcagatgttctgttacttaatagcacagtgggaacagaatcattatgcctgcttcatggtgacacatatttctattaggctgtcatgtctgcgtgtgggggtctcccccaagatatgaaataattgcccagtggaaatgagcataaatgcatatttccttgctaagagtcttgtgttttcttccgaagatagtttttagtttcatacaaactcttcccccttgtcaacacatgatgaagcttttaaatacatgggcctaatctgatccttatgatttgcctttgtatcccatttataccataagcatgtttatagccccaaataaagaagtactggtgattctacataatgaaaaatgtactcatttattaaagtttctttgaaatatttgtcctgtttatttatggatacttagagtctaccccatggttgaaaagctgattgtggctaacgctatatcaacattatgtgaaaagaacttaaagaaataagtaatttaaagagataatagaacaatagacatattatcaaggtaaatacagatcattactgttctgtgatattatgtgtggtattttctttcttttctagaacataccaaataattagaagaactctaaaacaagcatttgctgattgcacagtaattctctgtgaacacaggatagaagcaatgctggaatgccaacaatttttggtgagtctttataactttacttaagatctcattgcccttgtaattcttgataacaatctcacatgtgatagttcctgcaaattgcaacaatgtacaagttcttttcaaaaatatgtatcatacagccatccagctttactcaaaatagctgcacaagtttttcactttgatctgagccatgtggtgaggttgaaatatagtaaatctaaaatggcagcatattactaagttatgtttataaataggatatatatactttttgagccctttatttggggaccaagtcatacaaaatactctactgtttaagattttaaaaaaggtccctgtgattctttcaataactaaatgtcccatggatgtggtctgggacaggcctagttgtcttacagtctgatttatggtattaatgacaaagttgagaggcacatttcatttttctagccatgatttgggttcaggtagtacctttctcaaccaccttctcactgttcttaaaaaaactgtcacatggccaggcacagtggcttacatctgtaatcccaatactttgggaggctgaggtggggggattacttgaggccaggaattcaagaccagcccaggcaacatagtgaggccccatctgtctttattaaaacaaaacaaaactgtcacagcttctttcaagtgatgtttacaaattccctatggtttagtcacaaggaagttctgaggatgatgtatcacgtcatttctgttcaggcttttgagcctcctggaggtaaatggtttccttactgaaggcttgttattaccatgattatcactaagcttgaagtaacaaattaggggggcagactcacaacctcttgccctgccatggacaagttcaagaatctaagtaaagtcctctattgtctgatcttggatttgctcaacctgaacaagccaaggaggtgtattaaactcaggcacatcctgaccaatttggaattcttaagcttcagatcactgtggaagaggctcaactctttatggtgctgtagacttacgctcattttctaggtaatttataagggacctaatattttgttttcaaagcaacttcagttctactaaacctccctgaagaatcttccagctgctgagtagaaaatcacaactaatttcacagatggtagaacctccttagagcaaaaggacacagcagttaaatgtgacatacctgattgttcaaaatgcaaggctctggacattgcattctttgacttttattttcctttgagcctgtgccagtttctgtccctgctctggtctgacctgccttctgtcccagatctcactaacagccatttccctaggtcatagaagagaacaaagtgcggcagtacgattccatccagaaactgctgaacgagaggagcctcttccggcaagccatcagcccctccgacagggtgaagctctttccccaccggaactcaagcaagtgcaagtctaagccccagattgctgctctgaaagaggagacagaagaagaggtgcaagatacaaggctttagagagcagcataaatgttgacatgggacatttgctcatggaattggagctcgtgggacagtcacctcatggaattggagctcgtggaacagttacctctgcctcagaaaacaaggatgaattaagtttttttttaaaaaagaaacatttggtaaggggaattgaggacactgatatgggtcttgataaatggcttcctggcaatagtcaaattgtgtgaaaggtacttcaaatccttgaagatttaccacttgtgttttgcaagccagattttcctgaaaacccttgccatgtgctagtaattggaaaggcagctctaaatgtcaatcagcctagttgatcagcttattgtctagtgaaactcgttaatttgtagtgttggagaagaactgaaatcatacttcttagggttatgattaagtaatgataactggaaacttcagcggtttatataagcttgtattcctttttctctcctctccccatgatgtttagaaacacaactatattgtttgctaagcattccaactatctcatttccaagcaagtattagaataccacaggaaccacaagactgcacatcaaaatatgccccattcaacatctagtgagcagtcaggaaagagaacttccagatcctggaaatcagggttagtattgtccaggtctaccaaaaatctcaatatttcagataatcacaatacatcccttacctgggaaagggctgttataatctttcacaggggacaggatggttcccttgatgaagaagttgatatgccttttcccaactccagaaagtgacaagctcacagacctttgaactagagtttagctggaaaagtatgttagtgcaaattgtcacaggacagcccttctttccacagaagctccaggtagagggtgtgtaagtagataggccatgggcactgtgggtagacacacatgaagtccaagcatttagatgtataggttgatggtggtatgttttcaggctagatgtatgtacttcatgctgtctacactaagagagaatgagagacacactgaagaagcaccaatcatgaattagttttatatgcttctgttttataattttgtgaagcaaaattttttctctaggaaatatttattttaataatgtttcaaacatatataacaatgctgtattttaaaagaatgattatgaattacatttgtataaaataatttttatatttgaaatattgactttttatggcactagtatttctatgaaatattatgttaaaactgggacaggggagaacctagggtgatattaaccaggggccatgaatcaccttttggtctggagggaagccttggggctgatgcagttgttgcccacagctgtatgattcccagccagcacagcctcttagatgcagttctgaagaagatggtaccaccagtctgactgtttccatcaagggtacactgccttctcaactccaaactgactcttaagaagactgcattatatttattactgtaagaaaatatcacttgtcaataaaatccatacatttgtgtgaaa

SEQ ID NO: 286 - DNA, 102401 bp, Homo sapiens
tttttttcatctctctctctctctctccctctatctctcttctctctctctccctctttttttttttttttttttttttttttttgcttaaaaaaaagccatgacggctctcccacaattcatcttccctgcgccatctttgtattatttctaatttattttggatgtcaaaaggcactgatgaagatattttctctggagtctccttctttctaacccggctctcccgatgtgaaccgagccgtcgtccgcccgccgccgccgccgccgccgccgccgcccgccccgcagcccaccatgtctcgccgcaagcaaggcaaaccccagcacttaagcaaacgggaattctcgcgtaagtaacccaataatagtaataataattattaataatcacgagagcgcgcaggactagaagcaaaagcgagggggagagaggggtgtgtgcatgcatttttaaatttttcacgagaaaaacctccgagagtcgaggtaaaagagataaagggggaaaaaaccctcatcccatctggaaccattgccgtgtatgcacttttgagacagcacgcaccttttaattttatttaattttacaaaaatttgactcctcctctttcctcctttccgccgctttatttctcttttcgaaaaggaatgcaatgattccactccccccccgccccgccagttttgcaaaataatgaacaatgctaaggttgcgaacaactcacatgcaaacctgggggtgggagctggtggggaaagggaggttgcttcccactcaccgtaagaaaatgggggggtagggagggagtgagtacaagtctaaaaaacgattcccggggagaaaagaggtgagactggcttttggacaccagcgcgctcacggtcaagtgtgcagcgggaggaaagtagtcatccccacaatagtgagaaagtggcactgtggaaaggggcccccggcgctcctgagtccgcggagtcgggagaggggccgcggcgacggggagagccgtgggaccgggaaggacgggagacgcggccggcactgccgccttttgttccggccagaggtgggtgtttgtcccgctgccttttgtgccggctcctcgcgcttgccctcccgcgccgccgccgccgccgccgccgaagggcaggagctagggccgggggaggaggcggccgggggcacgcgggagagggagggagggagcccggactgctgcctcctgggttgccgctgccctcccctcccgaccgaacctcagaggcagcaaggagaagactggcacataaataaataaatacataaaaataaaataaataaaacaaggcaagagaatgtacaatttcttgcccccaaaccgaagccaaacgctctgccaacccttttctgtgacggccttctctttgactcccccaccagcccccctgcaaaaatctcacaatctctcatctagaaaaaaatttacaatcaccctcttcccccaaaccccttcagttgcaaacttagggcgccgacggcacggagagggagagaggaactccctcctcttactattttttggaagattttcaaaaaaagtggaagtggattttgattgggaaaaatctcgtgtctgaatgtttacaagcaccgcgtgtgcgggagcctcctgccaacaaacagacagaggaccgagcgcggcgcggcagccccggagcaggcggcggcggcggcctggcctcgcccgggccttgcccgacctcgccgcgccccagcccagccccggatcgcccacccggcgcccggcgcccacccgccaggcacggcggcaggccacgcagtgtctccgcgccagcctggcccgtggtcctggtccgcccccagcacaatgccgagacctcttctcgacctcccagactgcgaaatcggctgggtgaaactcggctttgcaaagcatttttattttgcagggcaactgtaaaagcgcgttctgcgcctcccctcccctccgccctgggtactttctcagacgtctcttgtccacagctcgggaccgcgaggaggtcaccacgtgctttccctgcccaccccccaccccgcccggtctggtcaccagtccccctgcgccccgagcacgactaggccaggtggcggggttgccggggaagggcaggggagaagtgtgtttgagtgtgcattttaagggcgctggatcctgggaccccgagcacttcaccctttgggtcttgccctcttccccaggcctggcttggtctgaggttcttgtgagtctgtataagagctggtggtggtggctgtctcccgctgactgcgcctggaaaggcgggcggtgggcacttaggaaagtttggcagcaagggaaagaaaggcgtgagggcccacattccccccctactcaatttatgattcttactttaaatttttgatgcagttttaaaggaccacctatacttggttctgtgtttttttaaaggggtggtggtggggggtgcgcacagggaatttaatttttcactgggccctggaacttgtcacacacttcggaagctcccccaccccggcacgttgcgcggccctccctctccccaccccctcgcatccctccctcgccgctctcccccgcccccaactcccccggccgcgccggatgcggatcagacgcggcgcgcggcggtgtgaagttacagcccggccaggtaccggcgggaaggaagggcagtgttcgcaggactcgggaaagtcaggcccttcttcggaaggatgcagtgggggctcaaaggacagaccggggcgcgcagtccaggctgctccctcgtacccctctccctcctgggtccatcttgggacactctaggctgggagggttagtaccccctcctcctgtcccggggttaaagggccagtttgggagggggtgagggggccacttctttctgtcctcattttctgggtgctcagagggggcaggagccatcccggtcctcagtaccacccccccgccccccgcctctgctatgtgggctgaatgagccattcggtcgctaggaggcagaacaagatcaagaaagctcagcgaacttgaacctgtaccagagcctcccccacctcctgcccggcgattctcgtccggggaggaacgagctttgcgagggtgggggtggggggaaagaacggttaggcagaattccctttctctcccccatcaccccgtatgtctttgttcttcattttgactttaaaaatgcttctggccggggccgcggagaagcgaccgggcgcgcggccgacacccccgtgcgcgagctgagaccagcgcgcgccgggctcggagcacggtgcagttttcgctttctttcggggccggcatttttggtagggaggaaccgggagtgcgcgctctagggcttcggggcatggccgaagagggggatatggcaagtttgcacttggtctccagcctcacttcttccaccccctcacccccatgcaaagcacagacctcggtggcctcggctggcttgctgggcggctctgcagcccgacaccccccctctcgcctcggagctcggaatcacaacaatagtaatagttatcatcataatgatgcgggcaggcagcgtcattaataatgaataaccgcagccgccgccgcgcacacccagtgcccagaattgcgggggaaatgcatttgcagagatcccccaaagtaaaaagtgtaagcttgtggacacagaatgaatctcaggacccgcgcttgaggtgtgtgcggagatactgagactgcaccaggttaaccagccgggttttccaaacctcacttcctttttcaccaactggcaggcccagggaaccgtcaccccgcggccgagctggccgagctggacgggcatggaggcagcagtcagggcccctggctgccctccgtctccgggcccccgggccccaaggccccgcggccgctgctgcacgtgttcgcagcaagcgcggcgggagcctgcagccagcacgctgctcgctttgtgcctcagagtccccgcgcccaacttcactttctgcacggtccacccttgccggggcccctgccccgggcctgtagcccccggctttgcttttgtttctttgcttttcctctctgaatttcagcctccgtttgcttctttaccctgttaagacaatcaaggagaaggacttggaaagcaaacttgaagacacatctccctttccccctccccctccgctccccggcagctctcgttttgctcgctccttaccaacatttcctataaggattatttttttcccttaaatttattcttttgcaactacacagagaggaaagagatctcagtctgtcactgagacattgagacgttccaggctgtcttgctgtttgaacgtagaagcattttattttctatttcttcctcccctcgtagagagaattcgcggctaattattatgattatttgcccactcccttccacttcaatcgaggactccctgctttgtagccggagtttaggccggagcttagaaatgttggtattgttggggcgaaggaggatggagttgaattgagggagggggtaaatggctgagggttaggaaggtttttagggaaaggggaatttgcattaaaatgcagagaaattatcagatgcccagaaaggaaatgttgattgccactgagaaaagatgtcaatgcaaatcagtagactacaccatgagaattgtattttcatattttctttgtgtcccactttgtctgatttttaataatataccagcaatgataaaaacacgttttggtatttctctgaacaccactagccaaatgttttgcaaggagaccgatgttaaacgtatttcatacattagaatataattcttgttaattagcaataatttacgttaagagcatagaaaatgttgaggttacaggttttatatctgtacatttgatcatcttgttattttcaagaactttgcctcctataaaattaattaggtgaaatgtggaggtgtaatcagcaacctctgaattaccacttcatttcccggttttgattgtaaatcagttcagtcactacatttagaagactttaaccaagtctgttttgaaccacattacctttaactatttgatacctaggagaatatttccttttgcacctaaataatattcccacttttagaaatgtgtcagaccttgggaacaaaaaaaaaaaaaaaagaatcttaacggtggaaataaaaaatttttttttttgcaaaggttctatgtactagtaagtttgataaaatattttcctaagtcttccttcagtctgtaaacctcagaacttgtagctaatgctaaacaaaaaagccacatttatcaatgtgtacttaaaatccttaattcagacaacaggaatattttgagaatgagttccctattcctcacttggtcaaaatggaagcaaatgtaagagaagaatgacattaaggcacaatgcagaggcacttctgtttgtcttcttttatttgaaaagtatgcatatgtattctgtatttatcttttggccagtatgttgggcaaagaaacataagtgcttactttactgtctttattagtaggaatataaccttcatattcctgtggtgaccttatgttaaattaggaggagtaccagaggctagaaattatgagatgtcctacttgagcacaggtgcagctaggcagggctctctcaatattatttcacctagcacatctgggagttactccagatcttccccctcaatattcagcctgggtagggttgaaataaatttaacctgagttcactggatttttgcactttatcaaaatctgttccaatattctacactcaaattaaaatctattttttgattctctgtggctttaagttcattaaatgtaaaattggcagcttgctaaagaaggtcagactgattaactgtttaagacttgtacattttctgcttcagttttattaactggcagcatcctggatgttttgtattttgtgattttttttttttttttgatagagcaagcataagatttcacaagcagagacttaccaactctcttttcccctttggaagcttaaaaaatgatagaagctggtaaagtagatgctggagtattttagtacaaagttaaaaaaaaaagcaaacaggaaagaaagacatgtctaccttgttataccatccgctggtgattatgtgtgcagaaatagtctcataatgaagcattttggagctcattcagaaaattagtccactttgacaacattaggcgaagtatttcaagtctaaagaaaggacttctcagccttgctctgaaatgtggtgtttgcttgaccattctgatttttatatcatagatgccaccaagtgcaaacatgtttagaatattataggcattccatttctcagaataaaaaaaaaatgactaattggcttattttcttaagtactcaaaagtatcccatttagctaatgtgtctgagaaatactgcccgtgcatttggtatttctttgattttgtggcactgctgagagtgagagcagaaaggtttttggcagtgtgaattatgctgcgacatgattattatttagatccgtttcataggtgcatgcagtcgttttcttattacagcagtgtaaatgtggcacatttttcatgtgacatagtagctttctaatttatgaagccatgtctgtttacttaggagtatatacattcacacacaaagggtgtgtgtgtttattcacctctcctttcattctttggcacaatggacaacttggtgtataggaaaaaagaaacaaatttggtttctatccacttttttttttaaccagtttttcttgtagttattatttaagctttctttatgttccctgtgttaactatttaagtagcattctttctaaacttacaaaccagacacatttgttgctgtgggtgtgtgcatgggtatatgtgtgtgtgtgtgttctctggagttatgcaaggaagactgttttctttacatatgtgatgatttgcctcattgacaaatttgctctctggttgataaccttcacatccttgtactttttgtatgctcacattttctgggtattatatagagaagcctagaaacactttacatgatgtggtgggatggcatggggttgagatgtgcttctcccctttctgtcctctctggcactctaataattgtgcttttgtttctccaaccacagccgagcctcttgaagccattcttacagatgatgaaccagaccacggcccgttgggagctccagaaggggatcatgacctcctcacctgtgggcagtgccagatgaacttcccattgggggacattcttatttttatcgagcacaaacggaaacaatgcaatggcagcctctgcttagaaaaagctgtggataagccaccttccccttcaccaatcgagatgaaaaaagcatccaatcccgtggaggttggcatccaggtcacgccagaggatgacgattgtttatcaacgtcatctagaggaatttgccccaaacaggaacacatagcaggtaaatgagaagcaaggagaaaagctgtttgcatgttttcttttcattttcagaggtgctgtagccaagcagtaaggagttgtgaagtgctttctctattactctatgtgactgtccatgacagccctgtaatgttaaaataatcatttctgttgcttacgtccagaacacagaaaaataaatattttccacctcactgaatcagatgtaggcaggataggtacacacatcagacaccttctctctggatctgtcgattttggatttcttttcttccccatccccaccttctcattttgaagtattgagctttactacacctagtccagcttccattgtccatttccagccttggtgacgtgtcagaggcaaagtggccatataggcatttgcagttcagccaatgacttgtttgactcagaacatctggccaggcctccttaggggttcagctcgttctcaaggcttccctgaagtagagtgggctggcagggtagttggaggtggtggaaagagttaactgagcttcagggctagccttggatccatattggctgtcagcccggatggggctgtaattaaacacagccccgtggtgggatgacaccatgaccttgactttaagatgccattttcgactggccaggccagagtagagagggcagttgctgaagcgcacagacatgcttactcgaaaagtttaagggcatgttggaaatttcaaaaggttggtttgacaggaacggctgctccctgcagcctgcctcctcagctaaatgataaatgcttctctgtgctctctcttgtctctgatgtggttttgacagatgtatcttgattttgtttgtggtttacacagccacatgtcacccttacaaatgtccagtccagactccactgtttctgctataacacaatgtaaaaattttcttggaaaaatacacacacgtattcaacagccctccctcctttggttaattttagcagggaggcagctaggtgtgtgggtttctcggcagctcaagggaaaaggaattaaaggctagcagtgggacttaaattcccttctctaagtgataaacagtaacactatatagtgaccctcaaaacattttttgcttgagcatgttagacaaaagtcaatgcagattctgtgatgacagacatgccatgcctgttggtggatcgctttcttccatctacctaccacccagctcccgaaaggcaagaggtttgttcagttttaggaaaggtagtgcatatcatgaattgattcactggaacttgtctctccgacctagtttgaccacaaagttgaaccataataggtcagtggtctagaggggattaaatgtcatattatttctcctctccccctctagaatttgatcattaaaaccaaacatggcattttctttctttttttagtgctttctgtgatagcactcagatactttccctttagtgaaatgggaaatctgctgctagggaagctgcatttgtggagtgtatttcttgaatccaccacatttaccttatgtgacatgtaggtgaagattttatctcccctaccccccagcaggatgtgggaatgaccatttccatgtgttgtcttgtgactggaaggaaaatgaacagaagtgtaaggcatgattaatgaagcaagagcaggcggaaggggatttgtcgtcttcggagatccaaagccttgctaaatcaccaaatatggagtaacacttgcgtgatgtaacatcgtatttacatatcgagctgctcgtttaaaagacaaaacacagtgtctgtcaagcaagaattaaaaccacacttcttactgaggtcccaaataggttattcagtcttagattaaccagctcaaaaattctgtgcctctgtatttagaggaggaatctaaatgctggggggaaggccttacatatagttaagacttttactgctatagttgtgaatctatgtagggaaataagagatatttgcttgaactccctggttgtctaaaggttctgttattatttttttaaagaacaagtataatagcagagcctagagaagccaaaaccaaaagcaaatttaaaatatattttatagcgctaataatcaatcatttaactgagacgaaaagctctctaagatgtctaagatattcaatgggcgcacaacaagtgctgtgacccaggtgaggtaaacctttcgtgcatgaataattacaaagtcttgatttctttcattgtgtttaatcacctgttcccaccctggaactggctgaacataaatagtgtggtcacatctcaaagtgagatgtcagtaactagaatcacgacttctcataattcacagtaatgaattaagagtttcctatggtgaagttaacattctaccattgcacataaattccgacgctctggccctcaggtgcccctgaagcgaagttctggaagacggctgtgtgtgtacccccagcccatttctctaaagcacgtctgcacaattccaagtctgcttttctttttatgatgaggaaggaaacaataacagtaatcattcagtagatatttgaattgtgtcacaaaaagaaaggagaagcaatgccttgtattaaggaaagagatatattgatgaatctctagaagaatgtgtttggcaaccacataaaaggtagtcatttaagcgtgctgggtaggaaaggctttattaaagtgatgtaagttggatttgagttcactgtgagcctgtactattttataggcaggaagcaagaataaaacagtgacagatcttcttcctaagataaataaagcttagaattcgggactttcagataggagaataaggcagagttctttaaatcttgagtaaaatggtatgcattttcactgtactcaggcctctccaagctgagttttttttttttttttttttttttagacagagttttgctcttgttgcccaggctggagtgcagtggcatgattttggctcactgcaacctctgcctcctaggttcaagcgattctcctgcctcagcctcccaagtagctgggattacaggcgtgtgccactacgcccagctagttttttgtattttcagtagaggcagggtttcaccatgttggccaggctggtcttgaactcctgacctcaggtgatccacctggcttggcctcccaaagtgctgggattacaggcttgagcgaccgcacctggcccaaactgagtattttttagaggattctttttacctggtgaatagatgggtatgtgctcccccacttcatccacgtacacatatgagctgtacacatagatgttaatcaggttgcttttttcattttatttaaatattcaaaatattgtgtgattgtgatccattgagatcattgaagtagtattaatttagctgggaattagcagcttatgttgtgtgggcccagttcatcaatatgtgtgtcaaatatccaccctcagatatcagcagcctttgacttgcagtcagagctttcaataggggttttgttttgttttgttttctttttttttagtctcatattttatgatggggggaaatattcatggaagattactgaatgtgaaactgctgttcccttatagaaaagacccaaacattatcccatcatgtcagatttgaggttttggcttattgcacataggaatctttaaattaggtttgggctgtcataaagttagctttttgagagactagagaaaaaatatgacaagtcctataaaatgtagtaaagtctgctcctgttgatatataacattttttctctttaaaatcatgaacatagacatttatatcagggtatttaaaattatttgcctagacagtatagctggtatttagataatgatatatcagacagatactctaaagaagggagatatagtaattcaaaatggaaatacattagcatgctcttaaaagtaaatcaaatacaatatgcttttcagaatttagaaaatgaacttaccttttctttttgtatccattctgattctctcctagctcagactgaactggaggatgtatttgtgtaccttatggtgtaattgtaaatgagactataaattatagtatgctattatgactacttatttttcttttctctttatttatgtgattctgaataaaaacgactgacttctgaagtgaattttcagcatggcagttaaaacaaaaaaacaccactaccacaaaaaacaatatactggtgaacattttacttaccttcaaaatccagagagtagagaatattgttttctaataagtacctaggattttcatagggagcctatgtttgtgaggccactatccaaagactaatgttcatgaaactgggagtcctatatacaagctgtatttgtaaataagacagagaaaggttgtgaactggcagcttggatgttttgtcaaagtacaatgtcagagaaactctttctaagacaaattgtaaatagaactgtcacagtgattgcatgattgagccgcagaagtgtcctacaattgttggcattgtcaggacttttgaaagcttaattaaacacagtggcccgcatggctgctaaacttactaaggaaagccaaaaggaaaaaaaaaatatatctaaaatgtagaagatcctaaagatcccaaacttcttcagacattacccttgtggtgacacagaaaagatgcattgtgcattttcctagtcatcttttataaataatgttttgagaataggtccacgtgatatgaagatcatcctgtgtgtgatgtggagattgtgttagtttttctgtctcctgctgttacagacagttaatgtaaaaatggccttttattggaaacacaaatatgtattcacttcaagaacaggagcagagggggacaaagtttccctcccgttctctgtgtttattctgtgaaagcttaaaaaaacaaaaaaacaaaataaccacacacacacacacacacacacacacacacacacacacacacacaaaaccagtgctgtaatttcttaaatcaccccattccttgttgtgttgcaagttgtgcctttactataaaggatctgaaatatgttttgcacacctttctcttagtgaatgtggcatataattgtggagctgcacatgggctggaaaatgcaactgggtgtagaaacgtgcaggcagggtcaggacaggcaaccttcagctcagggaggaggcgagttggatgcttattaatggcatcttttagagtcctggaaaatcattaatttcacactgcagcttccatgtagtttggctaatgtgggagtactaaattggggtacataaaaaacatgcaaatcctagggaaacattttttagatttttgtgatttctcaatgaaaatgtttaataaaggagaataggtgaatggtggctttgcgtgctggtcagtaagaaaggaaacaaattttggctttcctttggggggaaatattaaatttaaccgaagtagaaagcacagctagggagatgcaccaagattgcgtcactggatgttaatttaatctactttggttggtctgttcacaccctttattgcacaaagaagtcatttgacaaaatttaccccaagcccaagtctgtttttacatacagtagtaccagctttgtgcaataaaaagcacttagcatcaagctggacccagcctggcaccttgccacttttttagcatgagatttaatcaccaagcatctttagtacctttctgcttgttcagatttcatttgggtcatggctatgtcagcagtgttgttatttcaaggattaaaaaaaaagattctaacttagagcccacttttaacattatttcaaatcaagcaggtttttatgttatgtatcaatttggatgacattaatgaagttcataaaatatgttcagactatataatttaatggataatgactactatttttatttgtaatacaaataggaaattgactgttgtctccctccctccttggttcttttctcctacctaggtaaatgggcatccttaaacagcttctcccctttacgaccagggtatagagcactggccaatatcagtaaatttacctttgtaatttgccacgtagtttttacaacatgacctaattaatttgagcacgaaccatattattgctactggagtcattttctgtcacaaacttaatttccaggaaatgtaacctgacaaataagaattctttagctctctacatgtgctcctagagaccaaaggcagatttaaaataataataattttaaaagtgccagcattattaaagccagtatacttgatgccaaactcaatttgaagccagtaaacatcagactgtatttctaatcagttttaaaatgtaacttattccatattgggttcattggaatttgtctccctgctttttactggccagctgcactccctatgcatttttaaaacatttcagcaaaggcttttgctgttcttagcagggttagtaacttggggtctatttctgagctcattcgtcattctgcaatggcattgagttaggttggcaagggaaggatttgaggcatggggggtggtgaggtcacttctgatcccagcagggaataggtgagcttcatttgcctttacaataggcgcacagttactgcaccttggaggagctctcaggtgccgctcagatgggcgcatgtaaatgccctgtcagatgcggagctggaatattaatgcttcttccaccaccacaccataataaagctgtacacagcaagcttaatatgcagctagtctggggaattgtataaacttagatagcccagtgtgaaagacagcaatggaaaaatgctcgatatgccacagtttccattcttgttctcctttgatctatagcgaaatgaaaacatcatccttttcttctcttggagttgtctccccaactctgccacctcccaattcaccaccagaatttttttgcatgtgctggtatggagaaatgcaacataatttgtttcatatggttaattacaggcgtttgaatatttaaaattttaaatagccacagttccagcttttcccgttaaaagtatgtgatttgaacaaagggagtacagtgtaaatatttgtggtgatttgcaacacccctctttccccattacacacacacacacacacacacacacacacacacacacacacacagagagagagagagagagagacattcagtttaaatctagtactgatctaaaggacttctgtaccttcatttgtactttttttaaaaaacaactttcaactggaattccattaaaatatttcaccattatatttttgagtccacattgcttgaggttttaaagaagatttttataatgtgttcctttaacagaatcaacagctgtcagaagcagttgtggtagatccacaaaacgtataaagaaaaatacacgtttcctgaaacaaaacacttggaaaaataagctgctaagaactggcgaattagaagtttgcagacagggaactgaagtgtcatctcttggttcaccctggagactgatgtgagtggatctgatgcaatgctgctggaagatttacctgcacaggttgctcctctaaggcaacgcgcagtgcacgattgacgtatgcaccagagctaggctgggcctcagctcgctccatcttttgccctttttgatctctttagatagataaaataccaagttctcagagtgctaaacaacaaattatatatacctaaaggtgagatgatcaggtttaaacttcctgtaaaagaggcgagaaggcgccttgcacacccttttccagatagggctggcagcatgttattcagaactgaatcagtctctgccagagaattcccagtgggaacctggagcaggtatgttgatgaaggggatacctggggacctttggtcactcacaatgagtttttgtttgtattctcactgttgttagcattgccaatgaacaattgcacctacaatttgattttagttttagatagaggcgaatccactgattaaaaactcccattaaaataaagaatggaattattgtgaaacctgcaagggtgccttcaaaaagaaaaccagtgctgttgtatacctacctcgcctttctatttgctttttgaactttctaaaaaacacaaggaagctttttgctaagcatcagggcatttaaatttatattcatcagttgttcattttcttaatatgtaatgatgcataaaaaggctgcaaggaaatcacatctgttaatttttagggaaataaagtgtagcttggattcttatgttggagcacaaagcactatgtgccaagtctgttcctgtacattttaaatatagagttttaatatttggccaatccctgcacctcctcaaacaaaaacaaacctcaaaaaactaagagaaccaaacctgaagtattctccttcaccaactcaaggtataccatgattttatgatttatttacatttaggggggaacccctcagtgaaccatttactccccattttaactcccctgccccgatcctttcagtttccagttaaaacaatgcattaaccaatgttaaatcttaaatctcgtgagtttctctccatcacaccctaatattttaaaaaaattattcctttacatttaaaactgaacattggctactgaagaatgatttaaaggctgaaaaaaattttaataataaatcgtaaccttctcatgttatgtttttgttatgttaaggagaaaaaaatcaataaggaaaaatttaattctgataaagatactcttggatctttgaaaacaactgctgtccttttaactaaaacatttgagcagcttcaaagactatgtatttcttctgatcttggagctgtgtgactggtagcaagaaagaaaaaaaatcttattctacatacaagtggattgcttaacaagtcagcacagacacgtacttgtttgtacaatagagataaaaattcctgtataaaaataattcagctgctgacagcaggcattgttgttggacctgtcttttgtgcttgtcccagctctgggtccccctcccctcctatctgcttggggcagcctgctgcctgcacactgctgaccagaagttaattgctatatattaagtatataggtattgtatttaaagaggaatatctcaaggcttcctatatgcattccactttactttctgatgtgattgcggtgttgccagcaggggggtggcaggcaaacgctctaatagggaaaatcacttgaaggcagttaggggaaatttggccttcaagtcccatttgctctgtagtgtagcattggtttctaaacttttgtttttaatctaattctgatttgccctgtcacatcccatatcaaccctcattgaactctactcatgtagagtaacattagtgtcaaacggaattggtcaggactgtggacctgtggctcatacagatggttgtggatgtgggttccatgcagctctgcatcctatcctttctaataaatgttaaaatgtggcacatttctgagcagggcccaaggataagagagttaagaaatcagggggtagtacctgagatttttctcccttctctttccgatttccttgataacatccacatttccggtaagatcaactctaggagaaagtctgaggctgggggagagagggggagaagggtgcggagagaggttcttggaatattcttcgatagcagttcaaatgaaatccccacagcagagagcttttgggtctagcagtggagcggtaagctgggacacgtggcctttcgaagctgttattctcagtctgacttgcacaccagctgagataggacttaacatatactttcttgctttcacctgggttggagaggttggggttgggaggaagaggaggagttcattgggaattctgtcactagaattttttaaatgtcaggaggttagcaaggtgtgagttagcattcaagcaaaggattcttctccagactagtaattggaaagcctgcaaatccaggttcccacgatactctctaataactggggtgggatggtggtggtgggtggacaccacaactttctgaatgtcagctgatgtctgcatgacccgttcaccatggattaaatgcggctggtgccgaatggaggaaatcagaaaggcaaatctcaagcaacaggatttgcactcctcagaagtaaaccagaccttgctcctctccctcctgtgcttctcctttcttgctggtttccctttggaagcagaaacttctaaaattaatgccactccaagccaatgaaaaagctgtttttataccacagtggatgtttacacaggagagacaacttgagggggaaaaggctttttggaagggtggagggactcgtgttaatctgttctgttggaggactatgcagtattgcctatgagcgactctgggctgtttttgataaattaccatgtttagagataggtttggctcttaagggcttagttttatgaacaaagtccgtgacgatgtttgcagcctctgtttgtatcttagcccctttggcttgactagaagctctatgtttagtttaagctcagtctggaagatattacaattttgcattaaaaaaatgaggaaatcataggaagaaaaaccctttgctttttggatgaatcttactgataatttgctaaagctcatttgaattttaagcacttctttaatcttcaaaggctaaattgctttatgaatatgcatggtgtgggcagacttcagttcattacctagttgtaaattctaatgaccattaggtccttccagtaattgcgaattgttttgcatttttgattggcctattaacatgtacattcggtgcacatcaggctggcctgtcagcctgctgaaggagaaaaaaaaggtgaaaattgtttatagcaccaagattcttagattttcaatcttgcaaaattgatgatgtaaaaaaattaaagcagtgttttttcttctcaagattaaaagttcaccaagagatttgacatatttaatttacatgatgactttgcactccttcattaatgtaatttgcatatgaagctgttgttaatcacttttgatcatgttttgtgtattagctgcctcagtggctctcctcctcagatgccccagtagaaaggagcaaaatgatgcatcttcttgccaagtttcctttagtgaattgaggaattagaagtctaaccttgagtaattacatatgttttatccgttttcttttaacgttaagtacagtttgtgaacgtgttggctggaaatcgttctcatttggggagaagactgtaaaatttaagtatatgattgaggcacttccagatacatagagaaatatgtattgcctgtttctgttccccacgaacattgcagggcagttttattgttagcagtttgatggcaggaagccttggctattatagtgtattaagacatcaggttcctcctttggaggagggaaggctacagaactacaaacctttctaacaatgctttaggtttcttctttagatagatggctggcacctaaaggacttgggcctgggtttggctgactcttttatcttttagatcaagtaagttttctcattcagctgctgctctgagctacaatgtgtcctcccctcatcaccaaagtatatcctggtctccaggctccctgggctcccagtgtctccctcaaggtacacgagtgccctggtggtgaaaacaaggtgctaactaacggtttccgatttttgagagcctgtgattttggtgtttgcctttgctgttgaataacctgtgctgtattattgatgttcatctttggtttatgagtttatcactggttaacaagcagaatcagaacagtgtaactgatattctgattaaaacgaatgtttaatgaaagaaaataaattgtgatggaaaatgaacagtgtgtaagaaacataactataattttaacctccgagggacctagcactgccctaccgtgacttccatccataccatgctaaaagcatgcttcagtttaaagttgttaatattcagctgggaaacagtatccagaacacaaataaattattaagtgcatgaactttttaggcagtaagatgaactgatggggtccatctgtgagatccaggggctttttatttgtgtgtgtcgagcgattctgccctctccgacttcacagcctttggtctccggccaactgcatgcataattgattccacacgcactatcattttcttgatgtaattgctttactaagatatgatgaaatctaatggataatttgctatttgaaaatggtcaaaaaaaatcttcatactttatgtggggctgagtgggcagtggagaaaggggtattcagctgacccggtatttaagaaaacaaaacaagcaacactaacttatgcatgctgcttcagtcgcgttggctgtggataggaaggtctttgtgacatatggaagccagtgtataaatctctctccttctatcttgcatcacccccttcattccttctctctttctctcctctctctctcccccaaactttacaagaaagggatcctaacaaggtaaaaagtaaacaatttagtcatcacaagccttattattcagtctatccaggagttttgccatgtcggtttatttaacttccaggaatgtaaacactgacacagccctagaagcagcaagaaagattacagtattagagttaaaaacgtgagcatggaggagctgtgctttatactctgctataataacactttacattgaaacataatggtaagtcaaaagtgactggaaacttctgcttatatggagtacaaatttcattctaatagattggcataatctagtgtacccagggtagattgttatataatggagaaactgtataaatgtcaagtacacaaataattctacaggaagtaaataaaaagtattagaatttcttaagtcaccattaaattttggtggtgggacaatctcattagctccttcaaaatcatgtggctttgcataagtcttttgaaaatgtattttcagggaatttacagatggtgaaacattgttttaatccaaaccagttaatgctttaaatctacctttaaaaaaattgtactgtttttcgaagtacttaaagggagtggaggggtagaaagcatataagtgaatccatctcactgtggcaaactgtttttcaagtaaagtcataataatgaacaacacatgatctgaaatttgatcagcaaacatatccttatgccaaggaattttctttttttctttccttttttttctttttcgccattcacataccaaggttctgtaaatcagtaaaccaggcagagagtaactattgtaagggggaaaccaaatcataatacccagagtggcccagaagctgtctttctgaagaaacattaacgccaccaccaccaaaaaaagaaaaacaaaaaaacaaaaaacaaagcaaaacaaaacaaaacctttttaaaaaactggaaatgacagaatagttttaaaaggaaaaaaaaaaaaacccaaaaaccaaaaagcaacaaccaccttctgacgctcaaaacttcaaactattaatagaccaccagtgagatagactgtctttgtgccttgaaatgcaaaatgagggaaataattagcagaggaacaaaattctcaaaatttgaagaacttctgtgattactgggggtacagtgaaaagaaaatgcaaatttcttcctgatcttaattagattcgattgtgcggtgggtgtgttggatttggggggaggggcagaggcagggagtgctggggtgaggcgtgaggctgagtgttgtggagacaggttagcaggggcccggcggtgtggcaggaacaaaggcagcttccaacgctggtgcaggattccgagccttaacccagatgctcatggtgccctagtcttgagttcttcatttaggtgggcttatttcccactgggtctgggggatttcatttgtcctttgaggggcagggtggacactgacagaacagctgcggccggcagagagggtggttaggaagagggaagcagcctgtgggtaacttcccgaccacatggaaaggctgaataagacgttatggaccctgccttgggtactggggtcagcgtctcctggtggtgtctgcacagggccccccaatgccagggcactgccaaaacacgctcttgagtttaatggtagtggttggtctgagtcctgccaaagtgtatggagcaagtttcattggctggactttccccttgcatgaaataataaaagccctggccaaggcttatgaatctatttttgtttcattaatattatttattatgtattttattaatattttttggagggaccttgctctcatttgaccatttgtagttataattaatgcattccgtactggttgtaaaaagtgtgcttgcatttaattgcaagtcagggtaaattaatggatatgatttaaaacaaaactcacttaaaatattcttgcagaacgcaaaggagggggcagtcccagtatttaatttattttctggtttagtgttagtgtgagagggtcgaaaagattctgtgggtccaacgggatttgtgtctgtgtgtgcaggaccgtcgggcaacacagagggaggagaaaaacctggaccggagtagggtagccaggagctctttttttttttttctctaatttctgaggttgccaggaggggcttaagcaaagtggtcaagtccatctgctccggagaaggtggtaaagaaaagaggttagtggcaagagggaaggagcacaaagggaaaattgtacattgggagcgttactctccctggccatggtgtagccagactggtttagcagacagaatgatagattgttttgtcaggggtcccagggtgcgccctgaacttgaagcactttgtttatcttgaatagaaagggaaaagcgcagacataatcgatgtctagtttttaggagctcgaaagaggtaggagaacagagaagactcaggaggggtagtgggaggtgggggaggtgcaggccctggttgtggttgtccattaacagatgaacttggccgagggccaggctttagatgagagcgtgtcagggccccagtgcagccaagccttttcagtgttttttttttcctttttctttctttcttttttaaatacctgctgactgtacatcaaatgctccctggtcttttggctaaaggcaaaaaaataaaaaataaaaaaaaaaagagacgcacagctcaattttttccctcctctgaaccagttgaggccagtcttttggctacatatgcgggttctatcatctttcctggcttgccgttgggaaaaaaagttgtgataacgccagtaacccgagggccagatgggaagggtttggttgtgttcaggcgaccaggtgtgagagctcgtggtgcagtggggtggggcgtggccggcgtgcctgcgtgtgcaggtaagaaatcagtggaaactcttttttttttttttttttaaatggctgaagtttaacttgttggaagggcctgtgaattaagctgtcggtggctgagaacgataatatgcaaggaaggctcaaggaaggctcaagaaaggccaggggtggggaaaaggtgctcttgttagaggcgcagcctttcctgggcaggacccaggaccgatggcaaacccatgtgtttgggcttgttttgttctcgattttcttatcttcttggcctcttcctgtgttttttagtttattgtgacattatgcattcatatatgaatgttggcaagcaggagtcatcatcccaataacttcctgacatttttagctcttttaatgtgcagtctttgccctcctgccacaagtggcgaagtaattgaatttccctgttactaactggcaggaggcatgttctagttcccaccagaggagctgctggggctaaagctgggttcatagaatcccacctaggggacaccagggctttcaagtggtttggggacctgtctgaaatgatattcacacaataaaaaatatttttcccatcatagacttgaaaaggcaccattgtgcacatctatataaaatgtgataaaatcacatttacttcccctggctaggcctcataagggaggcaggatttccttctccttttctagtagcaaataaaaactgggaaaatttgggggcctctgggtttatcccatggatacctgcccccgctcccgcccgccaactcagccaagcccttagaggcagtcttctctcccacctagatgtctttgtaacctgagctggtaagaaagggaggagggacagaaagaggggaaatatgcccttgacatatgatgtatcttctttcttttcttcttctctttgattacacgaaataaaatggtttaggctgagggtaaagaagtaataccatttctagttgtgcaaccttgggcagatttcattccctaagcctccgcttcctcaatctgtaaagtggggagaatcacggggcttgcctcatagggcctttgagcatcctatgagagcatgtgggggcgctgggctcagtgctgggcacatggtaaaacatgtcacaaaagctcattactattacggttatgactcatggcttggaactgtgtgctcctggggtctcaaagtagttcccccattatggggtgagcaggttgggatgagagaagagcagggcaggtgggggtctaaagagctcagggtctcattatgtttctggtggcagctccctcgtgggtgggagtcccctctccccatagacgtgtgttgccttacgagaggcttgtgcctgcctgggtgtgtgacacagttactctgggttcagatttctatgttactgctagctggttgggagagtctgagggaatcatttcacctctctgtgaaatggagataactcaaggtcccttacctcatagagtccatgtgagaagtaaatgagggaaagcacagacattactcgctccgggggctgcacctccagaattgctgttgtcattattaccatgtgtctgacacattgatattccatcccacaacaacctcggaaaggaaacactcccattagcctcatttggtagaggaggaaattggggttcatcaagggttaaatgacttccctgagggtccacagttgttcaatcctttggcctgcggccgccaccctctgctacctcttcagtacgtttgcagctttcttcagcggtgccaggcaacaactgggcaggaagctctggtgctggacagttgtccctcccatgggttctgtggtcaagtttttcaatcttctgggaaagagaagaatgttcccctccagttctgggcatattgaaggagcacggagctgttgggaaaagttgcaatgtaaggaatcctgctttgcaagtagtcatttccccatctgtccagaatgagcctgaaatcaagtgagggtcctgagaaacagagggaggaggttttactgtttgtgtgtggcttggtcaggagactgcagtgggctgaatgagaaactaagctcggacttttaagaagtggtgaggcttggcctgcagcagttctgtgtgttgtctctgtggcatttacttctcggatcgtaccttcaaaggctggggagaatcagaattatacagggagggagagactgagtgtgagtgagtgtgcgtggcagtggtgtttcttaggacgatgggttctggggggtcataatctgcttcgaggaggttttcatttctggctgaacaaggctgtggtaaggcaagtccggaaggcatgctggaaacttgagggaagttttgaatggaaactgcagtcaacagctccatatgatccgcatgtggcttccccagaggcaagttttcagctgcgtggtggcctctcccagtcactccacaggctgccctgacgctattaatatttgctgaagcaagacctgaggttcgttgcagatggattacacaatgtattccaaaaccaaatgttactgttttcctgtattctccatcctttcaaattggccaggctaacatagacctccactgagagaatttcagaatcatttggtagttgagaagcgcctacttcatgcggaggccccgtgggaggagtggaagagttggcctcagcactggcgagtatcggatgggagctctgctcacttggtaagtccttctgctagaaccaagggaggctgttcagatccatcacaaagaagttgtcggtcacatccaggttgtcttctgagtttgaggtgggatggaggtggctgctgagaatccatgtgggtcaagagctccaaagcttcacttttacttcgcactctgtcccggggcatggacgtcctcaatggaggtcatgcaagcccttccccctcaccccttctcttggccctcttcattgtctctacatacccttgggtcaagagtgtagtggttctcccttgtcaccctggaagagaagctcttagttttatttgctgggtctcctagactgaaatgataaagctgaaatgataaaaggcgtatcatggctttagaacccttcttatttccctcgctcgcaccccctagttttccttctcttcccttgaaaatcagtgaaaatcaggccacatctctgatgatggccttttgtttctttttctttttctgtttctgccttcgttaggtaagcacaaatttgatgtcccaagaggcaggccggtgacccttcaggccaagtgcctggatgtggcaaagctacaataaatatcgaatggtgagagcaatggaaatttagcaaagccataaccggggagacctcagaggggcagtggactggttaagaggctgttggatgagccgggtagtatttctacttcaacctgattgaaatgtcgactaaaaatcaatgctgttgactagtgataatttacaacgttcctggtgctaagtagttccccgcttaagaatgcgttggctgggcagagattagcgcagggagttgtgtgtgtcacaatgaatcagacgcattataggtcagccctttatttgtttcatcatgacttttacacagttgtcatgtaatttatggctgctttcacgttgtcaaacattttcattgcatcttcttctttaacaccctcctgacatagacacactgcacttgaaggcttggtattgtttcataatccgagaggaggcctataaaccatcaaattacactatctttgggctaatctaaatgcgctgcagattaaaatcagagctcatttgtccctgatgcaaattattaagttctaattataaatacccatttaattacccgacacatttttattttgcggacccttttgagcactgctgtctgcgatgcagagggggtggggggagatgcataggagacaatctgcagtaattaatgtacacttcccaaatggtaaaggataaacatatgctgctttgtttgtcttatttatttattgattagatgtatagagactttggcgtgggcacaatctgaagttgaaatccttttaaagatgaaaactatttaaaaatcttttggggaagaaagagcaaaatatagccaaccaatagctttctgctagaacacatcatcccaaaatatgggattctgaatttgatcaaatcaccagtttctgaatttgatcaaatctagattttgcagaagttcagggtgagagaaaccatgcctgttttatatctagaaagtgaaatcattgttatagaaaaaacctactgtggttagaaaaaaaccacattcttttttcccagccctgctgccatcctctaccagaaaataacagtatctgcctgtagtatgaagaccttccaattgagagcattatgataaactatttttgattaccaaacacgaatgaaggaagaagataacataaaaattagtaaaggccttccaagtagacatttacccttctgtgaaagccatggagaaattaccaagactggtttggggggagggcatttaaggtcttttgggcattacagattttccagaaccaaactttgacttttagtgttaacagagagacactgatctgaaaaccaggacacctgggttctgacccttattgtatcatgctgtgagattttgggctcccttcacctgttagcatttgtttccttgtcttgtaaagtaggtaaaatagatagtttggactgggtgggtctctaagtccccatgatgttctagcatagtatgaacaccactgaccagttttctccctgctattttttggaatctagttgctgaatggggctcacctgcaaagacagcagaatattattttcttgatttgcctcaaagatggaagctatggtggagattaaggcttggattcgtgattccccaacagaaagcttaaaggcatctttcaaattgctggaagcaaaattgaagtgcagtataatggaatggtgataattcacagaagtttccagccttataagatttctccatcttttaattgttgcaagctgttttttttgaaaaactccaaagaatgtaatgtgtattttctccaagtttgcttttttgggcaaatgtaactacatcaaaatagaagtacgtttttgaaaaagaaatagttgaattcaaacaaccaggtattttaaattcaattaactgactgaattcagtgatattttcctccttcctcctcccaaaagctggtttctctgtatggacatagcctacatatgctgagtccctggagttaggaatttttgcttgttaaaggcatccgatgcaacatgtttagaagaactctccctctgttagtgttgaagacagcataaattgagggaaaatgttctttttttattcatcatgtaggtaaaagcatatggcctgttctgggacatgcgatctttgcaatccattttttaaacttggtgtttaccattggcttttagcacggatgtttctgttttccacactgtccagcaaataccatttatatgtggcattgaatgagatatgaaatgttttcagaagcatgctgaaaaagggcattcaaagttatcctttggataatgatgatctaaaactttcttttattatcccatgtgctcagagtaaggggcaaatgaatcagttgtgaaatatgtgttccttgtaggacacaggcactcttgagatctatagcttcaataaaaaggtaatttatttaaattactgcctctttaatttataatgttttggggatttttaataggcatgctctgtaagggcactggtaatcagctgtttctgattttgcatgctcttctatctctggtaacaaaataaaatcttaaaaaacaagaaaaaagaaaaaaaaacaaaaacaaaaacaaggaacataaagtttagccctaacccaacccaaaagcaaataacaggccgaatgaatggcagccccccagaggctctactttccccttccattattacctgaaataaaagcatgataacattcatgccagagataggtgacaaaattatgtattcagacatgaagtttaggatttcatagcccaatgttctctcttctcccccacctcttattgtgttgtgcaaatgtatcagccgttgtattgttaatgcatgataggaagctgccgctaggacagtcttggctcactaatgcggtcagctgtgtcacaatgtgatatatagattatatttaccatggcatattttgtttgcgaaatgggagcggatgataaatgaagataccctccagttttcacactagttcctgtggtccggagtctctcaaacaataaagcacccctgataatggagaggtatttatgggaacataattgacttcaaagttttagatctctggctgaagtttaagatgggatagtccattacattaatgtctgtgcttaaagctcctatttggcttaaataaattatttagggtttactgcttaaaccttggtcaattcttgaacgtttgggctagttaagtaattttccagtgactttctgtgccttggtgattcatttacttgattgagctcctgtgtgctcgtatgatttctaaatgtatttctcaagttttgcctggcaatgaatgattttgcttactggagtcttgtgtggtacacctataaaaggcttattaactctttttgaaaaaaaaaaaaatccccaaacacatcaacactgtcatcataagataaagcatatatacatatgcatctatatacacacatacatatgtacatactacatatatacatacgtatatgcatgtatgaatatatatatagttgtgtgcctgtgtgtgtgtagaaagggagagagagagaataggaaagtctttagaattcaccatgattccatcaaatcaatatagaagtttttgaaagctatccatgtagaaaccacttttcatcaaaatctgacttaagcaaattatctccatactatttatctgaaagtctgttgttcacatagcgctggattgaggatcatagtggcaaatttaggagcaacagtcccaagcaggaatcctggatggcaggctgtcctttgtgcctcccctgagttgagaagactggtgtttattctttctctaggttgcaacacgtgttgccttgaaatctcccttctttacggttctgccatgagtgtattttctgtgacctgcctctgcatctggttaaatggacttcagtaatctgtacacagttacttcttacttattttatatcctgaaagatattaagtccaacaagcttttacccacagagtctacagagaaaacggccaggcaatttttgtttcaatctctgtgtctctctggagcactagttccagaggctgatcaataggttttattgtagacctcactgtctctaaaagcattttgaccttatcctgtctaaaaatagtatttgctcttgcctgcagaaccttgacctgtgaaaacccatttggaacataactgacatatctagtcagctgtatatccaagacatgctctgtgaatgaattctgtgcagaaccgtccaggagaacactttcttccaagacaaatgaattccagttctgaacactgggagtgcacctgcttgtcggatgtggtgatgggccacatggtggggagtgagggagactcagggcctgtggggcagtcgatgtgggaggactgtcacagagactctcagagggtgcattcagccctgaacagggcaaaggactgcaaggggcaggagcttgggctgacatgcaaggtggctttacacaaggccctttttagagagtgtgattctctgaagcttttcttggcagcttcagtcttgaacctcactggaagggatcctccaaaacatgacccagatggaaagaagtatttctgagtttaaaataactcccctatttggtaatacgggactttatttgtgactttattatttttaggtgtgataatggttttgcagttgtatttaaaagaaaaaaaacgagttcctatgtttaaaaaatacatacagaggtgtttactgatgaaatgatatgacgtctgggatcaacttaaataataaaatgggctagggaggcgatagggttacagaagacaagaatgactgtgagctgtggtggttggagctggaagatgtggacttggggactgatttataacattctctctacttttgtagtatttgagatttttccagaaaataaaggtattgcctgactggtggagagcagtatggccttgtttagtcggtgttgtttcttcaccaagggtttggctcagaggtagcaaggggacaagtgtcctatgggcaagaaagtacctgtgagctcaagtcttgtatctgggaagttcattgtgaaggggtcatttaagggtctgtactgtgcactgtcccccattctcctggaagaacagagatcccttgtctttttcagtgcatgaggcagagtcagatgtggcgtttgcttgagtttcagcacaggtgcctctgtgcctcgtggtgagggtcaggaagaagcagctgggacgtgctcacgtggctggtagtgttatgaagacaaggctttgggacctttctttggccatttgagccctggctattagagaaagatgatttgcctgagaggagattgaccacactctcagaaagaaggggacaaagaacacgtcaagggttaagcagccttccctttaagggaggactggggcacaagatggaagatgaaagggagcagagtggcaattgcagagctggaaaggggaattttgttcttctagatagcaaaagccaggactgtcgctgtgtgacttgaaagctaggtcactggtgggcttcgtgcagcccgtcacaggggagccatggtgggcctcgtctctgccgtatctgctgcctggaagctgagactggcctaaccacatcacaccattcccagacccaggcccaggcccaggcccgggtccctctggttttacaaaatgtccgctctctctcgcttcacacagaggctattattagcaagtgtcactcagttatctgagagtggcgcttttagctgccatctaagtgcctgatacttgggtttacagcagattaaattaaattttaggctggtttggcttcactggcagtagacaatggaaggcagctgttgtagaaatgtaacctggcaccctcaaggatttgtgtgagtgtgtgtgtgtgtgtgtgtgtgagtgtgtgtgtgtgtgtgtgtgtgtgtgtgtgtgctgaccactaggctacacttccttttcctttcctctccatttcatccctttccaaaaagtgtttagacaaatagtttcccagacttggttttatcatgctgggttgacaaaggttgtgtacagagctggaataattttttcttctttctactgttggcacatcaatatctttttttctgcaaagaaggggctaagcttgcacgaaaacaccggtgggaacccactggagaagggcatgggtggtttttggttcggttggtggctgatctgatgggtggtataggcagaatgtctggctgccccttcagattcctgtagattccgtaggcgaccaacatggggtgggggtgggggactgtctgctctttttgatgcaaatatcttcactctccttggtgcttctgtggttgtgcctatgaatttaggaccttatgcctcatagtgttgagtcagagcaaaacagtttacatcaaaggccacttatttaattttcctcagaaaactctgtgaggataatttctccttcttataaacggaatgcgaatgtgtacacaaatgtgtacattatcccaccgaagggtgatgctctttacttttataatctagattttaaaaaatttggtggcacttgatttcaggtcctcagactccagaatttatactcactgattagtaatgcattatgcaaataattcagtttacatatccaaatactgttttgcatcattcacacctcatgtcttgaaaaaaaaagtgaaatgtttcctcaaaataaacaaaacctgcagaagagtttattgtaagggtgaaaattaaagaggaacccatttgcctgggaacttttgaggaaaattttaatactcctgcataaataattttgcaattatttttgattcctacctaatcaatataccttgccacgcaaggtatattctattatctttggctttctgaatttttcaattttcagaaaaagaagccataatactatatcatacacacatttgtgcataaatacacaggcataaatgaaaatttaggccgaattatttgaagaggatacaataattgcttgccagtgacatgattctcctgccagagagaggggagaataactaggtgcaaacttttaacactccaagtctagagagaattatccaagcatagccatgaattcctgagttatggattggcaaatgacaatgcctatgaaaacgatctctttgtcttcactgagttttctttgtcattggagtaatttaggagaatacaggatgtgactgggagccctttctgaataagcacagtcccatgcccacgtgaattcctaaaccagtggctcccagctgcatgtgtcagaacagaactggcctcagaaatctacaagattccagtggttccagcctcactttctccagtggtcaacttactgctgttgcaaagcacgtcagatttcaggagcgatttctcttgtaaggaaagaaggcaggcaggcaggcaggcaggcaggcaggcaggcaggcaggcaagtgaggaccttattttttctctgcagcatgagtgcagtcacctttttcctacgatgttccacacccatctctccttacaggttatagacacatttttggcactgcataaagtaagcgttccaacatgtttttaatctttaactttcacatcattaaaaagctgatgtactgactttcagctgcctggagatagttcagggcccagcacctgacaggtgtaatgttctgtgttttatgtctctcaatatggaggttatagaatcaaaaagaccgcaaaatgccttaaaggtgttgatacccatagacagagcatgcatagtcctcaggttccctttcttgccccgctttcacacctatttctttttttgtagcgcctgtatttgaaaggggttcctggtgtacttgggagaaaagaagcttcttggtttggtagtacctaccagagactccctgtttcctgctggtatcaggattgaaaaatcccacttctgtccattttctctcaagagttgagagatgtgtgccatcgctctttaaaagaaggaactctccttttgctgtggattgtagggagcagatttggtgcttactgtggcttcaggacccaccttgaatgacagaatgtcagtaacaagcagccccaggaaatacggctggtggtgaacgactgcctcttgatctttgcccatcgagcaacaccatgtggatggtgtccatccagcttgacctgaacttgaacagtaattgatgagtccttaaaatccacgcccggcccccaggaatgccttggggcaccccatcccacgttctgattctggatggacttttaagtgaactctgatgatgagtaggctcttaaaactctttctcaacgttctctgctgggtttgtgtgtcacctcccatgccctctctggtgtgtggtgattctcagatctagagcaatgcttcctgccttgtccccccatgcctttgcgtgtgggaagctaaaattcacatgtgcgatgccctcccatgtgccatttttacctggtcccttctgctcactctttattcatatttaaatgcaggtgagttggaatgtcatcttacaggcataatcctgaatctgctctatcgcagacattttaaaactaaattaaatgttagtactaagtagtagccaaattctctgagtctgcttcatgacaggctgtaacacactggtatggaacggtaggtctaatcctgtgactcctttatctatgatgttttatgtattatgagagctcagcagatgttgacagagggaatgagacaagatgattttaggtctaggtttgatagataaaaaactgggccaaattttatattttctttgaaaagatagctaaatctcagcaattattttattttatttattaagctttttgtagagacagggttttgctatgttgcccaggctggtcttgaactcctagcttcaagcaatcttccctctgtggccttccaaatttctgagattataggcataagcaaatgcctctggccttcaagtaattaatttaaagtcttttaaaaattttctctcctcccctaaaattgggttttagagtaaggttcttgttcctctagtcgacaagagtttctgaggaatcatagaagaaagcacagctctttgagcatagatagtttccttcgtggaaagccaaagtgaatacttattgagcatcttctatgtagacatagacttgtgaagtcatatcattaaccctgtcattttacagatgagaaaggttgaggctaagaggggagtgagtgccagagtctacttgctaggcagtggtagacttggcccagagcctggggcttcccactttcattcctggctgactgtaccaatcgcacatggcctctccatggccagcaggagccagaggtggcccgcatgtgctttgcagaggaacttgcacccacgcttttatcggtgatggctggaatgcttttcttaactggagctttgttgaagagcctggtgcttttgtggcagtgctaacctggggagcccatggtaaaacccaagcaacaaaaccaccacccaatcacctgtgctgttgcagagaatggtcctttgccctttcttcttgccttgttcctttccctgttttctctgccctttttcggggctggtcttcctaccacctttcctgctagggctcccaaagtgtggcccttctggggtttacatggtgtgcccagggaatagcttggcttttttattcagataactggagataatggagtagatggagttggggtggtgaaggaacgtgtaccctctcaggggcagatggccctccagaattggccagcccaacctcttcctcaccaccctagttctatttttaaagacacctctcaatcgcaggaaatccttccttttgtctaccttcgatcccttatgcttcattttaaacccatttcctcttcattccagagacgacaaagtatctcatcaccagctttgggctgaaatgcttcatattttacattcttcattccattctccgccacttcttcttcctaaataatctctttcctgaacctgaactcatggatctattatcttgtaacccatttattgtttctatgcctctctttagaatctgctggttttccagctcttttactcaaacattagtctgataactacagagtccaatggcaagatatcttagtgttttccacattctttagtcttatgtctgcactcttatgtcctgcttgcttttttaaaaaccagtgcttcattgatgactcatgctcagcttggtgtccactaggaatgctagatctttgtcagccatctttgagggcagttaaactttcactcccagttgtcctgatgccacatttctcccatcccaggtgcccctctctgtccttgtccatattgagcttagctctccactcctgacacgagttccctgacttcctctccacttccccggatgacggtgagttacgatcttgtctcctaaggtgccccctccctcttggctcctctcccagtgacgacttcatggaggctgagaaatatagtgagtggcctttcttgcctcacttactgctcggtaagttagctcagggggagagctgttcataactttgcactgacatctggagaacaaaggttttggaagagcggagcccagattccctgtgagccagcagagccaagtcttttttgagtttccagcaaaacctgtgttttaataataggagtgggtcattgtgtttaatagtacaacaaaacctaagtgcacataataagcacatcttttctgtgtgctggggtgaggagaggtgacagtgagtgtgtaggatgatatgaaaagcattacagacatgggaaagcatcttagagcacccaaagctggcatgagtcatcacaggcttatggccacaaggctagattttcaatccctgcttccctttttcataacccagttcaatgaagacataattgaagtggtgagaagaggggccaccgcccttcagactccagggtatttgtattccaggacccctccgtgggtgttggcccagcggtgcccagagaatattcccttattggatctttctcgaattgacttgttcacttcctgttcagcgcagcctggtggtgactcggtaatccccacagtaagacctcacagtgggttgagtggcctgggagctcaagtcaggggcagaaatggggaagctggaaagttgggtgatcaagagtcatttggaagcccccatgtctgtgtcagtccactcacatctctgtccgccacccaccaccactttctccctgcctgaaagcactgggctgtgtttcagagaggtagctgggtcccacagatatttatggagggcttgtttctgtatctccttctagtgggctggacctccccaggccatttttctaggtaactaggaaggcctgactctgtcagcaacttggctttctttggaggaggtgtcactctgggattagttaaaaggggatcagtggtattcacattggctcgtgggtgtattttctcctcctcaaattataaccttttggagggcaggagtcatgttttattttttgtgccttcttggtgcctaacataatgctggttcatatgtagtatttaatctgtactttgctcacgctgcttgattgaacagagaaagaccgggctttgaatggatccccagctccctgtccagggaaggtgtgaggctgggcaagtttatttcccccttcctccctggggagaaagtgaaaaagtgaaagtgctggggttgggatagctggtggtgtctttgtggctttcaccccatggtcaagcagtgaactctgcttgcagattctgtctcgctcacctggaagccagtgttggggaaggagcacgtgggggaggatccttaggtctgggcaacactttggagttagggggtcccctggaggtgtgggaagctggtagtggcattctggaaacaagctagagcctgtctcaccagagggagaacggctgagttcggaagggactggggcctgctttcctttgggtggctttgactggctcttggatgagtttaaaaggtgattctctctctctctctgtctctcttttctttttttttttttcttttttctgttttagtgtatgtgtatgcaagacctttgatatttgagtagggaaatcctctcttatcaatggaattcacagcctcttatggtgccttaccctttcattgtgttgtaaagacagtcagaccaactagatttatttgcacaactctgatttttttcctaagaaactcccccacccaatttaatttttttttttttttgagatggagtctcgctctgtcgcccaggctggagtgcagtgctacgatctcggctcattgcagcctccgcctcccaggttcaagtgattctcctgcctcagcctcccaagtagctgggattataggtgcatgccatcacacctggctgatttttttttttttttttttttttaagtagagatggggtttcaccatgttggctaggctggtcttgaactcctgacctcaggtgacccacacgcctcggcctcccaaaatgctgagattacaggtgtgagccaccgcacctggctatttaattctattttcagatggcttgttctccaagtcttgggactgcccagaaatgggttgcctggtagggctcatggctcagcactgcgatcccaccagtggccggggtgttccttagccttctagttcagttgtggcccttctgggcttcctttgctaccagtttccaccacatggctggaggtagcccagcctggaagcctctcagagctccagcctggaagcctctcagagagtgcttggagcactgctagctgcacgtgctctcaggaaagtccacaaggagatggctggtgtggctcagagtccttgtgtgctgcctcagcccatgccaggccacctgtggctgtctgccctcaagtctgtccttctctgaggatttaggactgtgaacctagagaattcaaagtagtggaactagaatccaggtctcgactcaatccagggagttttgctcaccacaagccaggaacagcttctcttcatggaggtgcctgtctggaaggcagagaatctctggcttgttgagaagagagagtctgcccttcagactgcaaggtgttcactgcataggacccttcgtaggtgctgacccagctgtgcccagtgctagagctaggactcagttctattttcccagagagtggtgtgatgggaggctatttctttttcttttttcagtcctgatcagggatgagtccgtgctgttgggtttattcatttactttagcgtgtgagtggggagatggattaggcagcaggcccttggaagggtgggaagattcagaagagagagggcaggactgggaagatccagacaggacatgaagatttgctccacaaagagagaagcagcaggagttctggctagaggctaacccaacacccacacctgccaaaggggttcccatggggtggctggcttgaggggatctgggcgctggtttctgctgtggacagcctcaagtggggcgtggaggcagcatctccagaagcacccggcagatggctcctgagggagcagggactccttctagtgccactcctgggactaaattccttgtcccctccttgtctcatatttagcatcttggagccgtgtcagctgcagagactggagtccggggcatgatggggatgtacctgaaacctagtgagagtcatcctgactctggggaagagccgctcaaagatgagaaagataaagtaatttgccacccccaacccctcacaggctagactatccatggatttcagtggggtggtgagtcctcatgatccctgaacctctcctcaaatggtgactgttctgggggtcctttctctgcctttctcagggggtaaccagaggtggtggtgtggtccactgtgactcgtcagctgttgctctgtgtgttcatttttgagaaaatgttaatctctgagacgtctaagaggtgaaactcctttctctgtgtctcctccaaatggatgccatgtgggtgggcaaagtggttgggtttattcatttactttaggtgtgtattgtagtaaaacctgcttgttctcctatccgtcatcagaggtgactcatacttgagacactaaaagagaataaactgtcttcataaggctgtgaacgtcgccagattatgaaccaacttcaagtaacgtagggatgccttgataattatattattgaaaccatctccaattagatatgcaaaatggagttgctgggggcttcagttttctttagaccaaataatttagagctgagaggagaggcagataccatctagtctcactttttacaatttagcattggatttgttgagcatgtactctctgcagagcattgtgataggttctgggttgggaggggagccgggaaggcaagcatcctctctcaaagctgcctttctcatttgagaggcgagtgtgtgtggcacaggggcaggtagaaggagacagatcctttatacctgagagcaagatgtgcagccaggaaagctcaaggacacaggccaagggaggtgaagtgacttgcccaggccacccagttacctagcacagctcagccacaagcccaaatgaatgattctgagttccacatcagcgcatcgggcagccaccatgagcagttccacagtgacaggtggggctctaggtggcttcctttaaaacatctgaggaaagcaggcttcctctctgactgctctccaggggtggtgagcacaggggttcatctgcagctccccagctccagtgctccttagccttccaagttgtttgaattaagttgcaagcccaggtggctgcacacatattcattttggagtgactgtgacacttgtatttcctgggaagcgttactatgtctttggccgagcaagtattacgccatgagctggttccctttcttttgcctttgaacacctacattgctgggaggataccttagtgagagtgcctgggccactgggcgtagcagaggaagcacctcatcattttactgatttatttgaaagaaaaaagctccctccaacccttgccttcatagaaacagagtgttgaaagcttggagaagaattaatgactcccctgccccttagtgtcttacatgactagctgcttctttgcctactgcattttcaacttatttcaacttattttctgtggcttggaaaatacgttgactgagtgatgattgttttcatgaaatggtgcaacatgtaaagcaatggttgtcattaatagtgcagttatgtagagtgtagctctttgagtcttcagttttgaatcagattagcgctctgttaacttaaaatagccccaaaaaagaagaaggaaaaaaaaagaactgtcagaaatcagagggaaatattagcattatgaaacatggtaacaagtggccattagcactttatgtctgcatgaatagcatctttaagtgttttattggtaacggaaaagagtggagtcacatagaatgacattacttcccaaattggcgagttcttttaattcagacttctccttgttattgcctactggggagcacttattcacctgtcaaattgtatgctagggtgggaaagggtattttagcttttctggctgcatcccgggctctcaggtagaagggatttgtccctttgccatggcctccttctctcctgccctccccagtgcccctgccaggaggagggagaatctgaaagcaagaatggagggagagtaatgccgtggaggcagctgggatttgtgcctggccagtgcccctgcacagtattggatatgagtatgggcatctcagtgtgcctggaaacgcagttggctgcacagccccagtgggaagaactctgaggaactgctggtggttggctcttccccaggctctcagcccctctttctagaggctccacctaagccttaggaaagactttcgtttggttttaactggctcctgtcaagggttcccccaaaccagctcaacccctccatttacattataatgcaaaagctcttccctgtgggtctcagggcctgtggggaaaatggaatctggctcaaacccaagatccaaagctaaagtgcccccaggttgggctgcctgacagttttatagatatggcattgagtggcctcctggcagtttggaattgtgaaggttcactcattcatttttcaacaaatattttgaacacctgccacatgctgggaacggttcttggtgttgggcatagaaagccttaaaaactccctgctcttgtggcaccccctttctagctggggagagacagaagatgcaccaataaatatgtgaattatatagtatggcaagagaagatcaaactgcctgcacgaaaataaggtggggaagaggggtaaggggtgcatggtgaccaggcttttaaataggataattagggaaggcccaatgagaagcaaaggctccaaagaggtgaggaagttggccatgagaattttgagaagatggttccaggaagagtgtgtagagagcagagaccttgtgtgtaatacgcctggctactggaggaggagcaaggggccctgaggtcagagtggaaagagtgcaggaggaggaggagaggagaccagctggctccttgaaggacgtagagcagggatttttggctctgactccaagggagatggaagccactggaggagtgatgtcatatgacttgcgcttccagagagtctcttgggccgcattttgagactcaagcatgggaaagtgaggcagaagcagtcagaaggcaaattttaggcaagtgatggtggcgtggaccagggtggtggggacgtgagaaggggctggattctggacatacttcgaagggaaaaccggcaggatttgctgactggtgggatgggttgtatgaaaggaagggaggagtcaagatggaccccaaaatgtgtggctcggtgactgggagaatagaattgctgtttattgggatgggccagaaaggctgtggaggtgctcagaggatgggtgtgtctggggctccttcaccacttcaggacttcagtggatgctagactactgccctgttcaggaagatcgtgaggggaaagagagtagccccccgattgtggctgttcggagagccccagttgactgcctatagctgagatgatttaagtcgagttctttggggagggccaggtgtttttctcctcctcctaatctttttgttctttttccttctctgttgttctttagctaccaaagacaacttgatcttttgatccagaaagatgcgctttgtttcttgcatttctttcccttcgtttgttttctcaggtctcaggtagaccatcgagctgctgttaattggtgatatttaggaatgggttggaagctgcatcttttcctggacttctcaggactctcactgccacgtgtcttgtgcttccacagaaccgttttctgagacgtccgtgtggctctgctgtgctcaggtccacggttagcccctggcttggaatttcttccggaaatccgttgtcctcttttccacaggttctcctcctccctttccccatttctggaaagaagtgggctggcacatagagcctttttccttgaaaggagagtgcagagccctctaatggaaaagtaaaaaaattcttggaatcctcataacatccaagccagccaaagctgagaccaagtaaattattggggggtaatttgcaagggcctgaatcaaacaaattgctttcttgtttctcagcttgaatctttagaccagaagcctgtgatttcggagtctgatgagaaataagagtcagtgtttctgtctgagccacttttctttggaggaggtcctctaggctttagcaatcacagaagaaccagtgacaggttccttgtcataggagagctccttggtcctcaggattcaaaagacaccttaagtagcagtgggtagggcgtaagtttaacatccctcaaggtaggccttaggtttccctctgtcccctctatggtgctggctttgccacatgtagaacaaactcttctggaatcataggtaacccaagggggagctcagagaagagtccaggctgccagtgcaaaggtccagccctgtcgccaaggagaccctcagggaaatgcacaggcctccagctattcccacggcccctgtagctgagcgccagcttcttcctgggccaagctgaggctgtttcctgccgtgtccattctcctagcaacgcttctctttggccagtttgccatagtacctgaggtaagttttgtcctttgcctgccaaatgctttacatcccggaggaaagcaaagtcctcttcagaacaggaaaagtccagtgcagttccacactgtgctattccagaacctcccagttgcattcctttgccaactaggtaatgtgctagggatatttgtctcgcagcaactggcaaccccctgtttgggtaaaagtcagactcagggacccggctgcagtgcttgctcctgtggcccctgcagggagtgtggcctggggtgtaattctgcacacccaggaagcttctctgtctcctctttcacatcaggccttccctgtgtcctgaaccaagtgtggatgagtttgagcttcctcctagtttttatttgtgtaatttgttgttgttgttgttgtttgggggtgggggtagacagtgctgggcctgtcagaattttaggttggttctttgagatgaataactacttagctgttgctcaactacttttgtttgtgaaagaaagggcagtaagcaccatgacatgagagaatttcaggtttattgtgatttcttttttgtgtttgcatctgtcgtgctcagttagggcattatccgtaaccccataggaaccaacaccgaagaccatatgattttaaagctttagaaatctgcgtgtgtaatatgtcttttgtgaatttttttttgttcttttgctttagaaactgtaataataatccatagtaattatcccatagtatgctgtcctttgttacaggagcattggattactgtgaagacgtgtcctgtatacagtttcaacagcttgtttttacttcttcccttctccccgcacccgtcgccccccaccccacccgctttctgtcttgtgctgtttggaagacaatttccacatttctgccatatgtcttagaaaagctggggacttagaagcagtagccgacttaggacagcaagctcagctcaggtgcggaggcagccctgtgtaagagactctgttatgcagtgagctgttgaaacagctgcatgtggaaacagttcttccccttgcctgtcctcatttcttgagagactccaaaacatctgaaaatgtaaaagcacttcacaaggttttaacttttctggcttgaacggaagcagcttcaagtcaacaagagcacaatagtctttgtaggttttggacacagttttctagcttttcaagaaaggcaagggccctccttccctccctcccttcccttcccttcccttcccttcccttcccttcccttcccttcccttcccttcccttcccctcccctcccctcccctcccctcccctcccctcccctcccctcccctcccctcccctcccctcccctcccctccctccctcccttccttccttccttccttccttcctttcttccttgtcttgctttgcattctgcagagctagaagagcatttaatccttggccctctgtctgttgggatattatgtttttttaatagtgcttgtttatgactaaggtcaaagacagtatttcagaacaaaaattagagttagttcataattgagtacatatgtacgttactgtttatttttatagtttgctaatttatttttaaacagctcagttacgccaacatgtttatagctctgttcatcacatgccttaccagtcagggtgttaaaaggcacatgcttttcaatagtttggatcccaagttaaattagataatgccatcaggtagcaatttaattacattaattgaatgtttaggcggaaaggtagttttgcagaggctataatgaaatcacatttataagtacccatgtataaatctcagcattatagacattatttgaggttgctgacagaaaaatggatatatatcaggcgtttaggaggaaacatgcggggggctgtcatcagtggtaaatgctgccttcgccatttaggagactgctgggcacggtcgttttcttagtgagctgcctttatcattagccctctaagcagccatgcacaaaggcacgtgggtgctgtgttttgtatagccagggctttcctggactcagcatgccagctggggccggctcactgaggctggaaaaatgagatacagtctagtgaggtctttgtcaccttggagggtctgaggactggtgcgctcgggttgacccatgtggcgtcctgagccagctctgtcctggatctgaggaacactgtctgaagttttccaggggtttgacagaccagaatgggggccgctggcagggcctggtggcattagatgtggcaagtcagaccacagctggcctgtgaaggtgactcttcctctgatgcagagagaattaaatgaggaggccagagccctagctgctgcctcccctccatgccctcagagaaagtgggagtgctggcatttggctaacaggacaggctattttgggcccaggtgttctttctgacctctctgtgatttctatggtgggtgtcaaaggatggctgggaaaggggatttttaggtgtgctaacatcccttgcctatgagtgattcactatcttctcgcaccatctggtttcacccgggctgcaaagcctagtgtggtgtcccataccctgcaaagccctatttgggttatttaccaaatgccaccatgccatctccacagcatctggcagacgaaccaggtggggctgctattgcttctgggtatttacgggatgcagatttttctgcccaccgttgttttgggagggatttccccctccctcaggtagagttgttctcagagatatctgtaattggcccttcccatttaagagtcagccacgaatgatttattctaaaatgatagacccaggtagagaggttacccaccctccgtcacagagtggccagctgtgtcccctgcttccgggaggtgggaatgcatgtggaggggtcgttatttcctaactctcttgctctggcagcctgaagagctgtctgtgccctgaacaacagcttagggagctggaggaaagagaaggaggtatgcatttgagggagagaggcccactgggttggacaagaaggtaaaagagggctggtttggcccctaagggaaggacaggaaagcacccgcttgttccctgtgtggatgcagtgtttgtccagctgaaggcagcctcactcggctgactacctgatgagtgattttccccaagctgacagctgctccaacacatttcacctacaagtcctgacaaagtggtgtgttcttttggggctgttattactgcagcaggcatttggaacaatctggaagaatggggtgccaaaggacacccttgaagccgtttctgagtatccgtcccttcttttctctccgatcctctagcttttttggcttatgaaaaattgggcccatccctttcgaatgtccattgtgctgttagtaatgaggatacggataaaatcacattttttttttgagtaagccctttgaggagtattgtcaaattgagactcacctcatgagtaaccctgtgaagaggcaggagaaagggtagttgaagcttagagaggttaaatggcaggtctggtctcatgcagccgcaggggtagactagggattctgatccagaactccttatacttctgggtccaccccacgcttccacagcctgcacacagggtagggaagttgtggcttgcagaaggctgtttttttggggggacgctctgttttaatagtttggagcaaggaagctagtggtgggcgctcactggtaggggaggcatgtgataggaatcagtttgatcttttaagcattttcagggacagatatgtacctgatattccacctctctatataatttcaagacttgattggcattgtccctaagcaccagtagaaagcttgaagaagcttctcagtaaatacatcagctgtatttccaggtgagcagtacctgctgaaatgctgagagaacgttctgactaggagggcttgggggagacagagacagagttggctgtttcagcagactcattctgctatttgctttttgccttggagattattttttctgggtgtcccgatgctgagctcccacttcaagaagaacattggtataaatttacaaaccagaagtagtcagaggttgacttttttgttctgttattccttctttgggagagcaggctggccaggaggaaggttcaagtgtgtcatatcctagcattcagataggtggcctcctctgccttttcagtgggtggctgggctgggtgaaatcttgcagtgactaagaaaggaagggtggacccaggcagacccagaaggtactgcatcttcatcattgatcctgcatgcgtgccggtaggcagcagttctggaattgctggggaaaccacagtgcagcatgagccctggggcctgctctcttgtgcccggctgagcatctctgttctgtttggggagtcctgccaggcaagtgtgagtcaaagaggagaccagggccctatgtcatgggggcagtgtcggctgagtggtactcttcagagttctcagaatgtgccgctcgaagccatgtaggcttccagcaggcttctagcagatggggttttggctgggttgggccttaatactcagtgtctttcattccctctctgccccctcgttcctttcctgcatttcttgctttcttttttttctagaatcaacgaagcagccaataaccaattttcaggaggtttagatgaatgtgaattgctgtttaatataaaaattttattaaaataataaagctctgacaaaagatccagaatattgtcccttgcagtgggctttagggttgcatcttggctcctaaatcttctaggcgggttaaattagtcctcacaaaatgtcacatttccctggcagctataggtttccaggagggtgaacaagggccatctgggtgtttgctgagggcttctcagtcctgggtaggaactgctgggtgtggaaaccaccaaggctttgtaagcctgaaagagccactggtattgggagcttggtctgcactcagacctgagcgccacacattattttcccagatttgggcaatctaatggataggagggagggttatgccccatctgtgaataggtggaggagagggtccagagaaaattgttgcagtgctcagaggaagcaatagcctactgtcttccagggacatgtctggctcctggaatgcctgtccaggctgcggtgggtggcatgggtaagggtttttaataaaaagtcacaatgcctggagaagtgaggctccttgcagccacctgccttttctgtcttgggtctcctggttggaccccattctggctttccacctggtcagagcctcctgaggctgcagaatggggctaacatgatcaagggtgatgtggcttctccatcttgggactaggagtgaccaggtttagagaaggtggactcattcctgctcccattgccaggacaaatgcagagtggatctgggtctgtcccttccacacagacaccttcatttcaacacattccgtgtgtattaagatgacagacacgttggttttgctccaagccagtagccatccccctagacagcccaggccttaaaagacaaggaggtgtttggacaagagcaagaaagaagtctggctgtgtcttctgggagccccagacagaccagtgttctttctcactggttcactccttccccagctcattttacccactcgagacttgattctcttagagattaagtacctcccctggtcacatagtttctgggtgacaggactagaatttatttcttttgatcaccaattgagtgctctttctgctctactgtgctaccatgatcagaggtaaatttgtttttctctgatgatgattgaaaacagttttattaacatatcaagaacattacaacacaaagagtttctggtttaaaaaatctcttttcactggtatttcttaaattcatattttaatattagaaagcatgggattgggtgtgaacactgcttttggatgttggaggaagataagagaaggaagctggctctttctttaggagcaatacctgagatcccagaattgtatgtacaaagtgtgtgatggcagagctcaaatctgtgctagcgagaaaccccctgctactcttctgaatctgatgaagaagttattctgtctgtgcagttttattaggctgagactttttccgatggtttatttttccgtttgctcacagaatgtagaggagagccaggagggagctgacacgttcacactgtttacctactccctgactttggagctcagcaaatctgctatccatcattttgtttcaccagcttttacaaagcaggatcataaactgtaagctcatttggagggacctgatctctgattgttgctttgataagtatctatacaaatattcatatcattctgatagtcttgagttgcattgttacaacatgcaaacctctcagttttccaggacttctggtggtacagcttctctgtggagtgaggcatatttttggtctggcctttcctccctgaagctctgttagcctgagatttcacctagtgcaacacaagttgtgtagaaagaaacataatactactttattccataattcactagtaaaataattagaataaaaggctgttttggaatgtagagaggcagaggggctgatataacttctcagaatgcatcttcctgttttcccgtcttaaatttttatgtgagatgagcacactgctgtaattaagaaagcagtgtaaggctgggcgcagtggctcacgtctgtaattccagcactttgggaggccgaggtgggtagatcacctgaggtcaagagtttgagaccagcctgaccaacatggagaaacctcatctctattaaaaatataaacttagccaggcatggtcgcacatgcctgtaatcccagctactcaggaggctgagggaggagaattgcttgaacccaggaggcagaggtggtgagccgagatcacaccattgcaccccagcctgggcaacaagagcgaaactctgtctcaaaaaaaaaaaaaaaaaaaaagaaagcggtgtcagtacttgcaaaaggcctttccctcttgccactcagggaagcacccgaaagagaacttacaaaccaggtaaagtatttggaagtgattaatcatattacaagagtgttcttcatttcccccaaaggaccatggcttcctgtgacacttacctgtgctcttatagatattaaagacagagccactggactgtgagctccttgagggcagggaatgaggctcattccattttgttctggcaagtagcactacaggtttggaccaaatgaattaaattggctgccattgaatcaaagcagaatgaaggtagtgtttctgaaacaataatataaataagtgcaaaattggatgtttaccaacaactttccagaaacaggtcttgtttcagaagatgtgccaaagatgtctcatgtgggcagggctcctgtggagacctctgttgctgagtgagtcaaccatgaggtcggctgagcagttcagggttctcccattttacagaggaggatgcagcgacccagaaatgcttgcaagcccacccagctaggcttgcttcacagacactcttttaactagttccatcagcaaccccaggttggccatacaatgtcatcatacacattttaccagtgaagaaactgaggcttggagaggttaaagagctgctcccagacacacagccaggaaattggtggtagatgaaggatccagctcatctgtctaacttgggagcctgagtgttcatcttacctatccaccaaggcttgaagtgaggtgccccgactgtgagttccaggtttgatgcctacagcccatcagccttataccttgtcttataccttaactggtggagggtgctgtctctgtgtagcagccaccagcctagctctgaaccctgtcctgaggagttgggaagtgtggggtgtctggtttattccatcaatacacgtagtcccttccattcttctgccattttttctcaggggctctccttccttccctggctcttgggtaggctgcctgctctgatgtaagttcctgctgggatgattgctctggccaggcccccagctgctccctgcccttctctgaaggcacatctgtcagcccacagaggcacggttaatggtggcggggaagcagaggcagtgcataatgggggaactggccccgggaacctcacctgccctatccctacctgccccctgtcccctccccgcctgggcttgacttgtccactttcactctcaagaccaccgctctcacacacaggtcctgtgctgcccccacagctttgcaggctgctggttttccatccagggcacagccgcaggcctctgggcaccctagccctcagtgcccagggcaaagccctgacatgcaatctcactggcaggcagcctcaggcaggcctgggcagaggaccgaaaggaggagaggagggagggagctacagtagagcagacaggagacaaacaccagctaagagtaaacagcctggcagtggggtgagtgcctggctggaggggctcacctgggctggcctgcctgggaggagccaggtcggtggctgctctctccgaatcttagtcctgcttgaggtctagcagcttccggagctgcacatggggcttgaggtctggtgcttatggattaggaggaagagaagacagatggcagagtaccaggcagcttaggaacatgtctccttccacatgctgtggcccaggtgctgcccagagctgtttcacagcagcctctccactcaaggttgagcggtttccttcagtgctgtccacccctttggtccggggagcttcatgttcctgggcctcactgacacctgcatggggttggtggggaggtatgaggggttggaggggtctttttgctagccctggcccgtggcaaacactgtcttgagaaagtgggacgttgaaggagcttggactctaaagtcagctacacatgagtcttttcacctgctggctaggtggccccggacaagtcaatcagcctattgggcctcaggctctttatctataaaatggggctaatttccttttttgcccctgggaagaaatatcacttagaggagttacagaatgtgcaacctttcccaggagtattgctcctgaaggaataaggcacgatgggctttgacttcagcctccagcactgtggcccagaagggtatggctgggcaggggcgtcacacccctgcagctctgtgggagtgacggaagggcgctatccactcgccttgcacatggctgtcttgctctaccaggccttaggttctgtggccagatactgttctccagctctttggcttgggccccgagaccagagaagataatggcagcccagaaacctgaatactggggaacacattgtagggtgatctcccagaaaagccagcgagaaatggactgtagctgtagcattcttccctttggatgcctgtgtggggacagaatcagtggaatggaaaatgaagaagaaacactggccctgcctctcatcaatgcccccccaccacccaccaccaccacctgcttcctgttctattagacaaacgtagtttctggatgagttggacagtcatctgagtttgatcaagatttacaggtaattcaaatgtatgtataaggtacatacatattagtacatccatcagagaggcttccttaagccacaagtctctagctcctcagagaactggcagtctggctgggtctgtacgaacttggacctatagatgacctcactggtttctccccttgtcacctcatctgcctgcttccttctctttactgatcttatgtgagtaggtagaggggtcagatcacctctgctcagctctgcccagcacactaagcctatttgctattaaaatttgaaaaacaaatgcaggtgccagaggtggctaaataatgaatgtcccaggccaattctaggaagggaagtgggtatggggcagcccattgccttcctggtaccaggatgatgcaatgcttggaggctgtgagctccccaccttctcagggcacaccctgtgatcttgtgggacccctctgtccagcccagcctgggtgtgcatcttgtgtgcttggtcggcactgataggggtcgcggtagggagttgtcggcacacactgctgcatgtcctgtgagcggtccccaaggctgtgcccagccttcagtgtccagggcctcttctgacaggccctgctggttatcactgttggcattatctccacgcaccacttctgtgcccagggctgctgggtcaccttaaggagccacacacccgtctacatagaggcccttcctgcttggggtctgacccagttatcccctccacacctccattctcccagacttttgactcaccccagccctgctaagagtgatgtcctcccccaaagagaagacccctgctcttgagggtctgccaggtgggtccctcatctccccacctccatgggcctcttggattttgtgcatagcaatctctgcaacaccctgacctttatggggtcatcctcggccaatgaagcggtgggtccaggctcccccttctatcacctggctcacttccatcctgcagaggaagcttggtttcatttaggacaatgtgcaggatccttttgatcatttctctactggatcatcagcaaagggagaaatgagacaaaagaggccactgagtcctttgggggaaatatgtgcctatagtaaggtgatagttcagagaaagagaagagtaggaggctggacctgaaggccttccaaaaaaagtaaaggatgttaaattgctctggaaggtgcaaagtgccatccagtggaagctattattattattatcatcatcataatggtcattatcatcaccattataggatatggcactgacgtaggtagtgactggtaagagccgattgagtttctagctgattcctgatgttaggggccatgaatctgtctacctggaatgttctaattcaattcaggagcggcagtttaagtctagacttcaaagcactctcatatatccttggcctgctaacctgagggctagtttctagggattgattaacttaaagacagttcatatatgcttgaatactagctattcatattctgaaaaatctgacttgatcaaacagagcagttaaaggcgatgcttcgttttacaaaagattttcccccctctttacaaaaggatgcacagtggtattcctttcaatggaatgtttctctagctcattaagtgtttacaggtcattagctactgcatggaaggactttgctagagaaaaggaaggctgcaaggaaatagctctagctctagctctagcttaggggatgctagctaaagggaattagaattggttggccaacaggtgtctgcggtgtactccctgtccactcaacactgggggaggagtagagatcttgcttccttccatgtgagagcttatagtccctttggaatccagatttatcgtgaagtaatcgtgaagacagaaattaagtgctacattgtgttcactcatctcttatgactgtccatggggaaatgggtcctgctttacaaaaattcagtttgcatgctgcttttcaggcctatgactgtgacatccagtgagggagatttgaggaaggggttgatgtaagactcctcttgggagcatagtgagagagagagagagagagagcactcacagtggaacctagagtgggaaaggctacctggtggctgtcctggcatgtaagtaagtctgtgtggtcagggcttgcattccataaatggcccaggcccctgctggctgctgggagagaaagtcggtgaggagagagggttgtacaaggcaggagagatgtactcaccaggctcttccagaaggggtaactgtctcaaatccttgccttgaacctgcagcaaagtggaagataggtgttatcctcctctcttccctctttcctgcttcaggctactctgaactcacttttgctgtgtgtccagagctgaccagaggacaatggcagacttattgtcagactggcagcaccagcctagtgctctgtctctgcctgggaaatggtttcacaaagctccagttctgccctggacacttgcctcatagggctatccctttgcccctcagtaacaccactgggatggtccactcccaccctgtcccccatctgtggtagcctgtgttgcctcgtgggacaaggcattctgtaaacgtgtattggacttccattgcttaagtcatgatttgtttttccgacttccagaactttcccggttctggttttctgggatttcatgaacaattccctgtttccgtaatccatttcctgcacaggtgcattgctttcaatcatctcccctccggttatcctaaagccttcattatcaattgacttttcacatatgagggtgacctctggatcccttctctttggtttgtttgttctcttttccagagctgcagtatgtttcttaggtgttttaaaaaatagctaagaatagtgaaaacacccttgtaatttagagactctcagaaaaatgacagcaccatttagagcctggaattacagtttgacttcactgtgccttctctgccccaggctcccatggtggcaagggtttttggttgggggaaggggtattgaattgcctgtctttgagcaggaaaagaattacagttttccaggtaccttttgtgtgtatgtgctgattgagggcccattgagaatattttgacttttagggaagctccaaactctcaaaccacagggatcacaacacatacgtgtgtctgttatgacgttatatgtaagcatcacaacaggcagagaatgtctgcaccccaccctggaaaacagcctgactgtgccccatgggcaaaccagactagtttatagggggttctactctgaggtactgatggaccttgggtgctattcctgtgataaggaaggcagctagacaggacttgggagttatctgtagtgagatggctgaaaagcgatacagggctggctctatgccccaggtgtgcataagtaagagcagatagctgattccagtgcaaagtccatacaggtaataacataggccagaaaagagatatggcatctactcttagacataacacaccagggtcaatacaactttgaagctagtctagtgcaagctaacagttgcttttatcacaggctccaggaagggtttggcctctgattagggtgggggcgtgggtggggtagaagaggactggcagacctctccatcggtggccgtttgcccaggggggcctctttcggaaggctctcttggtgatggagaattggattttatttctcaatgggaatgaaataatttgtatgccatgccgtgtggactcccaaaattgtaaaggaggtgaagcttcccctgtctgcactctcccctcctcataattgtccatttttcatctgtcgggctgtccacccatccatcacatataggcacctatcaggtaccagctactgtgttaggatctgtgttcccaactgacttgcctccccctgacgtcatattcttttcctttttcctctcccttttcccttttcttctgacccaaactaggaattggggaaagggcctgataactttgtttctgctgaggtgtaactaataaataccaggaggcagcattttagttcacaagctcggagcacttactctgctctaggaactttacaaatacgcactcattttattttcatacaaaccctatgaagcatatactattattattcctattttacggatgagtccatattttaaattccagctgaagaaagaacatttggtgataaatcattaggaatgagctaggagttatttgtcatcacagaaccagtctgtattgccccaagtctggctttgccaattggagattagggagatggaatgaacacttttcgtcccctttgatatctcatctcactgagctctgggccgtttccactcttctctccccatactcccatcttggcaaaaattgcataagatttataagacattagggtattggagataatttattacaacctccttgtttacagaggggcaacccaggtccagagtggggaggtgaccaggccatggtcactgcccagtttagaggccatgcacagatgagaagccaaactcccagctcccagcccacgtcttcccactctcccatgtggcctgtcagcatcaccctctctcactcttgcttagcctgtgtagctcaaggatgtatttattgccctaggcgtaagaatgtgctcaggtttcttaagtaatgtaggtgtgcctcacccatggggcttcactttctctctgtttattgccagtagtggtctctgttctgttttcttcagtttctcccccttgcattgttgtctaagatggctgtcctgtcttttgtccacttcccctccactccccgtaccttcctttaatcagcttccgccactgcctgaggccactcagctctggtcccactggaggccctgtctcccccaggggtccttctgcttcctgttcacctctgatcccccagccctgccatggccaagctgatgaggatgggggagggggaggcagggggaatcttaatttcctgcactgaagctttgctgtccacagcactgggcagcagctgcctccctggagtgttgtgtgagaccttgatgctgtctttcttcccaaggcctttggcaaggtagaagtcatctccttgactctccatgctgctaatgggggaggtcaactaagtccatttctgagctagtgggggctcttaggactccgaacaccacacttaagttatctctgacccagagtccaatttatttggcctgattcaaatgaatgcccattttaagaatgttttggggtctcttcccatcatttccttagtgtagtggagaggtttctattcggaataggatgacatttggtagctgagccaaacagatagctgggatatagggtttggagttgaactctccagggaatggggtgggaggggggcagcctggaggatgacaaaatgagggctccctggactcaaactcaaaaccttttctgtgttctcgaaatgccttagatgtttacctaagagaaatgtagacatacattcctataaacacatctacacagtgtccattgtagcactgttcatagtggtcaaaaagtggtcacaacccacatggcaaccaataggttgaatggataaacgccctatggtggaatacaactcaacagtagaagaatgaaagagtaacacactccacaccatggatgaatcccagaatcattctgctctgtggaagaaattaaacacaaaagacgatatcctgtatgagtccatttgtaacaaattctagaattctcaacactgtggtggtaggtgggggttcagtggttagaaggaaggggtcagagggttagggaaggggattgacagcaaaggggcatgagggggctttctagactggtggacgtgttctgtatcttgattttggtggaggccacacagctgtatacaactggcaaattgaatccaactgtacacttaaaatgaatgacttttgttgtatgtaaagtataccttaataaagctaaagcgaaacaaaacaaaacacccaccactggagtggaaccaagtctgtctgtaacctttaactgtttgggtctcctcaagactctagccgtctttcagggtagcaccaaagtacatttcagggaaatgagaatgccctttgtattctgagattttatagaagttggtaatgacagagagagagagagagagagagagagagggaggcccactgagatggggttatccaccataagcagagcatttgggtctgagaagcgcatgagtactggtgagtatgtgaggaaggagagagcaaggggaggaaatctgttttcctagaattccagcaggcttcaaaaagtaaaaaggggagggagtacccaactaagtttttttcttccctagaaatacatttattctaaacattagcccaattagttgtcttttgtttgtttgtttgtttgtttttgagacagggtctcgctgtgttgcctaggctagagtgtagtggcatgttcatagctcactgcagccttgatctcctaggctcaagccatcctgtcacctcagcctcctgagtagctgggacgacaggtgcatgccaccatgcctggctaattttgtagagatggagtttctccctgttgcccaggctggtcttgaactcctgggctccagtgatcctcctgccttgacctcccaaagtgctgggattacaggcgagagccactgtgcctgtcaccaactcagtcttattcatcagtatgtcttctccttaagcggagatgctaacaatgtagcatctcctgtgctgaattcctgtaaagtgagggtttttgtttttcctacatccatcttcctctccagattccctctcaatttccaaggtatttagcgtaaatgcaatatctgaacttcatttatttggcagatttgtgtggactgccttttctgaacctatttgggtgctaaggactgtatggatttgggttcttaacatggaaaacgtctgtgcctgcgtagtgttgggtcctacctggccacttggctctcaacacggagtgatgatgcctagggtgttttgacgtgggcagtcagcccagcctggagaactgaggggagcatttctttcttttttttttttttcttttttctttttttggtgagacggagatttactcttgttgcccgggctggaatgcaatggcgcgatctcggctcactgcatcttctgcctcccaggttcaagcgatctcctgcctcagcctcccgagtagctgagattacaggcatgtattaccatgcccggctaattttgtatttttagtagagacggggtttcactgtgttgtccaaactgatcttgaactcctgacctcaggtgatcctcctgccccggcctcccaaagtgctgggattacaggtgtgagccacagcgcctggccgggagcatttcaaatgatagttaggacttccttttactgtacttaatagctgaagggggccaaaagtgtccatgtttgctgccctctggcatcaaaatgaggtcctttttagtagtgctgcatttaaaacagcattaagaatacgtttttagaacttagctttttgcattgaggatgcgcaggtggctgagactaacttctttgcagatgaccatggttgaaagtcagctatagagttgcacaaccacgtagttgggcttcacatatagaagatgttgtcattttttggtaactctgtcagactttaccaacctggcgcacagtctggttggcacataaacttcacatttgctcttctccagggtgtggggtggctgtttaaagagggtggatattcatgctaatctttgtgtagcataacatgttactgcaacttgcttttttttttttatctgaaagttcaagtagatatcagaagggaaatgtttgtgggtgctaagaaggttaaaattaccattttgaacagaaatgatatttggaaaaataacttcccttttaggaaggtaaatcagtcatttatatgctatttgttgaattcctagaatatatgaatatcatgtcacatgctgtgctggtactttcaaatataatagaagcaagtaggagaaagagtccctgtattgaagaaactcattgggaacacatgaaattaattagaggcatagagggttaaccagcaatgtaaggcctagatatgagtcagggagtggtgcatgggatgagtgttctatgaggttggagaaggatgagattgattcttcttgctaaggtgactaggtagaccttcattgaggccttgaagtatgagcaggattccaggaggtaagagaagaagaagaaaagccaggaaggaaatgagaacggaagggatttttacttgggcagaatattttccttgatgggtacggggaactaagactggaatagaaaattggagttggattgtggagctctggaatgatggcttaaggagttggaccatatcctatagatcacagagggctgctgaaatactctgatcagaagacaaaggcagcatgctaggggatgttaagtgaggactctgcaaagggggtggatgagttgttgaaattctctgttatacccttcatgccgagttctcccctgttgacttatatgttctagaggatggagttggttgaccgtagggtttcctttcactagcagaatggaaccagatattgtaggagcctagcacatgggtctgttactaatatagaggactgtttaaatcttggaaagctttccttttgcctttgcccccattgcagatggggagtgggcaggaatgacgttcagaatcaagggcccatcagggtctgtattggtcccttgtccctctcctccagtccatccatgttgggatactcagggcatggatggtgtttcatgatagcatttatcattttgatgatatgtgacaaaataaggcaggcatcaaaattcatatccctgtgatctctctttaatagtgtcctcctgctttgggggttattaagctagcctgaacttgagtaaacatttttggatggggtgagaggggggctgataaaagtggttagtaaatagacagttggaaaggagaacggcccgggggctcaggagatgagccagggaacaaggaaagcagagatgctagtgacccagagtgtcctagaggggaaagaacctctgttagaatttcaaatgtcagactttcttttcagcttccttcaggtgcttcctcttctactcagaattttcttttgagataggtgctggtcaaacaagcttttgtttgtggctggtcacttggcacacagtgtggctgtttgtcatcctggatgatgaggcagctattttaatggcacgcagggccgccgtgtgtttactgccaagaaataagggcttctaggagacttggtggctttaggaacaaacttccagcggcagaaattagttaggaagcagagtagcactgggttccaaatgcctctattgtatgaatttggatatgttgtgggcaaaatgacataaaagaaatggaatgagaaatagtgtaagtgactgacaaggaccccattggcatgtgggctagtgttgactggctctcacagtgtgaatttagttaggtgtttccactttattttccccaaactctaaagcaacagtttaattggggtctaaggtaccctttagaaacattttgaccacctattatttaggacacacagcattttttttctttgaagataaatttgttttgggtatggctgggtgtggtagcttatgcctataatcccagcactttgggaggctgaggtgggtggatcacctaaggtcgggagtttgagaccagcctgaccaacatggagaaaccccgtctctaccaaaaatacagaaattagccgcgtgtggtggcgcatgcctataatcccagctacttgggaggctgaggcaggagaatcgcttgaacccgggaggcggagattgcggtgagccgagattgcgccattgcactccagcccgggcaacaagagcgaaactccacctcagaaacaaaaaacaaacaaacaaacaaacaaacaaacaaaatcgttttgggtagcagtggctttaggctgtttttggatctttggctattgatactgatttgaaattttttgttattattttcatgttaagcaaaactagaaagttttaccgaattcccctgcagtacagtaagtattttctttcattgggggaagcaaactatttacagccataacagggtttccagtgaattgtataagtagcactgagttctgtgtcagcaaaaaatgaaacaaaaactgatcatagatgacattacctaaatgacagtacctacgtgtgtcctttctttcacatttgctgtaatcctgttatggcattgtcctattatctcaagtactgtcatctttaaatgctgtcaaattgtaactggattgccaaggacagaggagaggaaccagggaggacacaatggcaattcccactgcaccaaagagacggtcttcttccccctctcacagtctgaattcttggagacattgttcagttaaaatcatgactcaggtatcttttacaggctttgatgaaatagtcagattcactcctcatgttcctagaaggaaaggaagaaacactctttgaacagcccgtgagacaaactcttccaggataatttaaatgtttctacataatgagaataaattgtaagtgttactgtgtttttaaaacccaggtcaaaagtaatagcacagagagggatctataagcatttaatatctaattgttcatatattgcttccccaggtttagatgagggctccattctagagttgggaaaaccaagtcagtaaacctttagtggcagatgttatcagggagctggagttggagtacttgcattttgtgtttgtgccagctgtccatgttcctcttcatatatttagaccaaattcttatccagatttcccattaaaggttcataaatttccagttttcacctttctgcagcttccttagatagaatggttgatgagaaaattaccgcattaaaattaagcctcttgctttttacattctgctgctcataaataagggagtgggaaatggttactttgaacaccctcgttaaaggctggtgtggttgccagagaatagggctaacttaagggggatccgctaagccttctttttcatgcctttttttgttttgttttgttctggattttataaaggcatcatttagttttcccttaatctgaatctgtattcatttttaaatatctaatgttgattagtatgttctattatttatagccctccagaaggatcccaagggaagataatctacatttgagaagacgatttcccaatttccatacagatgacgaaaacgtaactgcccactacactgctccccctgctgaattttctttttccactctcggtgtgtggcattgtggggtgcagacacctgaaagcctgactggagatgtaacatgggctctgctgacattagcatgaagagcttagctaatcgacttgcaaaatataggttagggagttttataggatatcaaattatcttactctttcattgattaaaggcaaaatattacattaactagatcattacatgggtaaaaggttagaacttcacacacttaggggtgttgcactatccttccccttcctgccttgtggcaaatcacaggttggaggcagggaaactcactgtgtctagcgctcctaaatgcctgaatagcaacgttagacttaaaggaggggcatttgccttcgctttgaatctcccgagtcttttttattctgatagaatagtaatcttaaaattaaatattaatttgttctgattccatttctgttagcagggaaaagggcaaatacatgaaagggcgtgggctgagccatggccaggtttgagagacagagtgattcgcagtagtcttcccagggtgttgagtgggaacgtctccctgggaagggatgtggtcattctcagactgtgggctcagactctgtcacactgtaatacctctgtcaaccatctaatgctatcaaggccttcctgagagaagtttcaggcccaatcctgatgttgagttggcatgttcacatgtctggtaataatctgccagctaatccatcatgctgctcatttctgtgcattattcatctcaaagccagaggatctcatgtccatcacagggctgtggtctgtggatagggaaaatttcaaggcttttctgggcctgatgtagccattttctttcagtatcttagattggtaggtctttagaaattatctctcaaaatgtgtgtgtgtgtgcctaagtatagttttcttgaatttctcacttcagtacttaactacacatatgtgcagaaagtgaactcttagaatttggctatccgttctttctcattgtgtgagaaggaggcaaagttgccaaattggaggtggggcaaggtgggccagtagagctgtgattggtgtctcactttgatgtgtaggagagagaacaaatcacaagtcattctctggaaaggagccatggtccacccacagaacaaggaccctgaaatccccagtaccagtctccctaggatgtcttgcctttcagcagctgttcagtcaaatccatttcagaatggagaacagcttgtcacagttctctactcttgacctgctgatagaacaaggggcttggagattttgggtagatatggaaatagatccctaaacatactaaaaagattttttttgtacgtgtggtgggggagaggagaaccagagcagaaggttggagaaagaaagttggggaaggaaactaaaatgtgcaatctcattcctcagccttcttgttgaaaatgagaatcagatgcagcaatgtattatttccaagagctatctggtgatgggatccatctggtgaagggctacttctgggggacctggaattgctgtgtgacctttgggaaacacttgccttctctgggttgagctcagcccgtagttcacaaggggcattgctggtatttatagactgtgtttgacagtcccgagtgaaaggcaacttcacttctcaccccagaatagcaagcgttgtttctcatatctaggttgctgggacagcttcccaggaacctaatattcagcagcttcgtgacgttggatggagggtttttctttttaaatgagttgattggcttttgccactttacacattgttttccaggtctaggtttatttttcccttataggtagaatataaaagagtatggggtctgccctggctcacaccgttctgtttttgcagttagcttaaaggcatggaggacattcctgggactagcatctgctagccaagaacgaagatgacagcaacatggccgtagaggcatgggccctgctggggctaataacccactgcaggctatccttggcattcttgctggagtggccttgctccaccctacctggtcactgtgccgttcagtctgggctatggcctctcaccccacctcatcccattgcatttcataagccagtaactccaaggccagacttccattacactctggatgactgcatttatttgcagtgacttcaaggaagaaggggcctgtttaggaaattaggcactggcctggtgaaaaggtcaacttgcgaaattgtggctgcaagggatgcctttttcttccaaggctatgccttggtggtggtggtgagggtgtacaaattgttttttgtatttcctattttgatttaaatactgttttttgtttggttggttggttttttttttttttttttaagtcctaaacaagtgccacagaggatttctttttggcttgaacttgataaaatttggagcacacaagtttacacacatggtcatgaacacacaccccttctcccatctccccagacccccagcacatatgttccataatgaggtgttcctaagtgagaattcccataatttgaggttttatactggaatggtgataagggcaggaaacctcagcccatgtgcattttttctcgagtggttaacctttcctctctttctccttctttttttgcccccctccaaattcccccttctcttaagaaaaaacacgtgagccatgttggaagtacagccttgacctcagcctcaccaggtgcggctgctgaccggtgcaaaaaaataggaaatattatttaaaaggcagggaggggagagtttctgttccacaatcactgctgtttcagtgaaaagcaacccggtttatctgtaaaacctacttccctttctggtgaatgtggctgtttttgacagcagaggaccccagttgttgaggactaaagagagagaagatgagaaagaagatgctggaaacagaggttggagaaagagaggcaaggaagtagaaaggaggaaaaggggaagagaggaggcagggggagagagggttggaattcgagctattttcagctgaatgtgagtgcagatttcatcaggcttctgggctacagggaaactgactgtgtgcggaccttgcgtgtaacttcctgtgaagcagccgtggtgactgcattttctgacactgtcagagtctggacaaccctgccagctcctagaagggcaacccaacaactgtcacagacgaagcatcaaaagcatgagctgtcgatagtgacctgcatttgcagaaaatctgagggctttctaattaacagaggagctctaaattagagtaaagctgttcgacaagacccctcatacgcggtaagtgtcacaatgcagataatcattacatctaacaagcttctgatttttaacagaagctatgagaccaactcatttataatggttcagtttcaaagggggaaaaaaaagcaaccaagaaagaaaaagaaggaaagaaaaaaagggagaaaaggaagaaagaaagaacaaccagaagaacaaaaataggaaagaaaaataaaaagaaatcctccttctagtgctttgggcgagtgcttagacccagtccccaaattcttcctttgttgtctgctgaagcatccagatacatcttctgttttagattttccttactgtaatccacgtctgctaatatgccagctcattcatttgatgtttcctggggacgagcatcctctcttgagttatttctgacaactgcagcattccacagggtctgagttgttgaacacagtgccctaacttaaatattacaatcaaaacacatgacatagacagcagttgatttgggttctgccttggacagagaaacagactggggctaaagggactgcagctatacctggggacttgcctgagatcatctgggacttgcctggtctcaagtcttctgaccttggccagggatctttgcactgggcaggggaatttgagtcccaatttgaggcatcgatttaaaccacttttcaaaggcctgaatggagctgattatttgtgtgtcttcttttcctggtcttccccttgtcaagaccatttctctaccacgggatatatattagaggggaaaacggctgtaaaccctgattgttggctagcattgttcaggaagtgtagcattaaggagcaacacttctctcgcctgtgttgattctcctccaactacccacactatccttgcagttattcatgggaaataatataaatcacactgcctgattcttctcaaacatctcgcaaagtaatcatgggctgaagtgcaggttttcttgcagtgcctttatcagtaaatcagattttgagcatttatcagcaaaagttagacttaaacatcatcatttctgtaatgtttgaaagaaagatttgtttcagtggggactctgccaatcaatgatcttccagcttgactctgctatcaattattgctgcaattatttgtctagttggatatttaaaatgtcatcagaaagagatgattacacattctagaaagcaaggcactgtataatcacatgaactgaatccagttaaatgtagtgtggtactaacctgtccttcaaaatagaatttttgagctaccactgaagcagcagtcttctgccctgttttcaggaagctgatcttaaccttgggatgcagtgtgctttcagggttgggtgatacttaattatggagaactttccaagtctgaaaatggaattgctccttcacatacgcgagaagtgcattttggttatctcattcatctgcaaatctataaataagcagtccctctattcttcttgcttcctgtggatttaaatgccaaatcctgatttgtggcaaagttgtcacatgcccctttcccactctgtatgcctggtgcccaggaactaagcagtggcagtggaaattacaactgtttggaagccaagaaaaaagctccatttctcacttttctccagttccggatattctcggctctgctccatgtatcagcctcctccccacacacctcctccactgcacaccctccttctgtccgctccgtgaacaggaaacagaaatacagctccaatttttttttttaatggaggaagagaaaccacaacccgaacaaaaaactcaaaaactaaactccaaccaaactaaactctcaagatagaatcatgagagatgcaaaatgtccaaaatgtcctaagtggctcaaaccacccgccccttaacaggtctgcctctcttcctgggagtcagaagtgaccttgatgaactggatgttaggtccaaaaatgacaaacaagccctccactgggaaacatcagtccaacccctttcttttgacagcaggactagaacagaccagaggttccggagaaggtctctatacctaggtgggtttcctgagctggagaattttccatggggctgtctgtgtgttgaggcttttccccattcactttcccaattcacttcccagagagcatgctgagctcattccaggacactgtgatggtcaaaaggctctcccaccatcacacagaatgtactagggttctgttagaaaattaatctcacttgtggaaaaaaaatgcccttaaaacactggagccctgagttgtatgtgctggagcatgtggggaaaagaaagatgtagggggtggagcgtcaagaaaaacaagacaaaaaaattcacgagccatggaaatggagaagaaacactgtttctgctgcagttgctcttagccaggggccagcgtggacagcactgtcaccttgatccctgtcctccttcacctgccagcttgtgggctgggtggcttaagttctagccctgggtgaccctctgactcctgagagcatgtgtatgtgcttgtggtgggtggggtgtagtgcgttaaagccgcaaagcagaggtgcgaagggcctggtgtaggtcgtgggagacagagagaaggccctgggttctgaatgtttttacttttcctaggatccctgcttcatttttgttttcaaggagttacttgtttctctcttcttgccttccagcatgtcccaagcagagatgggtggctaggtttgggaatggggtgctgggaggggaggggatatcccattccagggcccttcccagttttggggctgggaagcctcaatctccttgagcacagcagggctttgccttctttcttccctgagctgcggccaccactgggctgtaccaggatctagtgcaacttgggtgacaaggtgtgggtggctgcaggtgttctccctgcatctgaggcagggaggcagctgggggcttccagccagcctgtaatgcccctcccaggtctagcttcctagccttatttttaagcccttttagtggagcaaaaactatttagaactatgagttcaaaaataggattattcaagcggaggtacttcacactgttctttctcttgggacagagatgggggtgcaggtaggggatgagaatagaggaaaatgtggaggattgctaaaacaaattgagagaggaaggaagaaagggacccagactagtaattgagaccaattcaccagaagacttaaggaaatttgacatccgctgtagctcttttaactgtgtaattacacagcatttggaaagtgaatgattaacctgattgtccataacaaccattgagtaaatacactattacagattgccaaaatagtacagtgaagcgatggaccagcagccactttcaaggggctgtaatcctctcctgggtcaaggctgacccagaggctccttggttagtgaatcatttactagggaaggtttcccctggtcactgctggctccatggcctggtccttccagccaggtcatttagaatggctctccaacaggaagaaaagttcactgcacagcgcttgaatcctaattatttattgaggggctcttctttgcccagcatggtgctggacagtcagaggtagaccactgagtcttggttcttagaagccttgaacttttagttggagaaccagtggtagatacatgctgattacagggagacttggatccaggagaaatggagtggagagccaggttcagaagagagacatatcctttacaggcctttgtgttacctagccagtgccttcatgtccccagccccctggcctccagctcctccacccccaccttcccccctcctcgctgtccttggtgcagagtggggcagtcatctcagtggggcctcctcccggggaagtccacagcttgctccacaccggaggagccgccaaagtcagccaagagccgcaggccataaatgcaaagtatgatttaacaaaagcagcttttgagtgagaaagctgagtggagttgtcccaacctgtcaacttcagatttctttcctcctccccataaatcaaaaaacggttggtggaagggagggacagaagcgtttcattttcagattttgtaagaaaataaaataaaatcaaaagaacctgtcccacgctgataccttacatgccaggtttgagcctgaggcaaatttttgtggccatgtaataagcctctttaaaatggtgacagacccttgactctttgccttgaattacattgataaaagacattttattgcattagagctggggcaggagtacaggacggttcttgcctggtcggcctctttgaaaccgcgtcagcctgccgtccacactctccaccgcctgacagggtttgagtgcgatggcagctgagatctgtgggccggtgacagagggggctttctacccagcagtagaaggttgaggccctggaagcaaaaggatttcagcctgaggggcttgttaagggagagttattctttcctgttcctagtagacctgagagagcttgacgttggtggcctctggtcagcctcatggttgggactgcgtggaaatgctagacctgagagacctcatttcccaagcagtcttagagagactcaaaacaaaaaatggtctccgggtcccaccgtggtgtgtggccgctgtgcccgcagaggccaggtgtccataggctgagtccccacgtggacctgctaggtgggtagaaaggagttgaagatgttgtgctgttggttggaggagcttggaggtgtctgggaacattggatgttactcatatggaatcagcagaattagtagagccaagaacagacggcagtgccacaccccatggctggactgaggctgctccaatgatggcaggttgtatctgcgggcatctccaatttgctcagggaactctttccagattggtcagtggtataaatgaaggattaggaaattgggtaaaaagccagggaggagggaaaaaaaaaaaacaaaaaacaaagcacgtcaaagccaaggcctgtgttttgttctgtgggactttgccagagagatgaggactgaggctgggctgctgtgtgcctgggaggcgggaaggtgctgaggcactgcagagaagcagctgcagcatgccccgggcagaggcctgttttctgaaagaaggacttgccgtcatgggaggaggcctggcctcgcagcaccagagcgctccttcattcagcctcacctcaggcgagagggcagcctagttttattcctgaagaaatgttagagcctgacctgctagaccattttttttggtagagctttgaagccttaaattagttctcataatttctgagcagctctgtgttaaccataggacataataggttttaattctggagaatggccagttctggttctcagaatctcttggccaagactgtcacagagtattaggcctgtgaagtgccttccacgcttcccctgaagtccacacaccagtcactcaatagtgccagaaaggcaagtgaggagattgcctgaaaggggctgtatgaccagtgtccagacgacaggtttctgccgcggccctgaggtggcagtgggaggggtttgtcagaaggtgggcagggtcctgaagcccagccctgtcctccctgtccacagcaggacacttctgagatcttcgagttcctcactgggaggtgaggctaataccttccctcattccacagggcgactgttggggcaggatgtgaggagagtactttgggaagaacataacactttccacccagcctgggcaacatggtgagatcccatctctacaaaaaatacaaaaattagccaggtgtggtggtggcgcatgcctgtagtcctagctacttgagagctgaggcaggaggactgcttgaactcgggaggcggaggttgcagtgagccaagattgcaccactgcactccagcctgggcaacagagtgagaccatgtctcaattaaaaaaaaaaaaaaaaaagctttccataaaggccaggacagatgtgcttccttaagaagggctagagttggaggccttgccctcctctgggcttgttggccttgggggaggcctgacagagccttcctggggctgcctgttcttctggccccttctccgtgcacagaccagtcttggatgataagtcaggaaagccctccacctggccgggctgcagtgtcgctggggctgcccacacttgctgaccatggctccccactcccttgtctctcacagcaccactgcccctgtttccacagtgcccacgaacaaaacatcaggagtctcttggaaacaccatgtttgattatttctttctttctttctttctttatttattttactctaagttctgggatacatgtgcagaatgtgcaggtttgttacataagtatacatgtaccatggtggtttgctgcacctatcaacccatcatctacattaggcatttctcctaatgctatccctccccttgcccctccacccatgtttggttttctttagcttattctagtattttctcaagaccgatcgaaatgataatatagaggcataaagcacatttgttgtgagttgatgcagataaaaaggcttggggtggtcttcagagtaatttgggagttgtgtgttctgctggctttgatagacaagcccttctctgctctggcaggtgttatcagaatcaaacgtttgcaaatgatcattctcatcgcatccatcttcacagccccatgcctcttcctgaatgctcagttgaaaatgcgtatttcaccttcctcaggtatctaatacttaacctgggagaaacgcaagtgtggtttgcaaggctttccaggtgtccaaatgatgatttcccatccttttcttcatttctcgagtggggcagggaggcatcggggtgtttgtgatacgtttgtgtgaagctggacaattcgggtgacagaaatatgttcagggcagtgtcttttatcgtcccttctaactacaaaggcatggattgcagttgagccccactttcagaaggcccaatacacacaaaaatctcattaatggaaactgataaattagagagtgatttttcacattacagaaagattgttaacttttcaaaaggtttcaccacagggtttctttaaatagtgagctcccccactgaatttaaagtgtttgtttacagatcattaactacttgacagagaggatattgggggttgggggaaggaagacacacttaaaaggtaaaatgttagaagccctgccaattttcaatgagcctggaagggtgacgaaacatctctgaaattatgttggttagcaaatatgatttattttacagaaattcattttacacatggctttccaagaaccctccatgctgatggggtgtggtgggaggtcaaggaccacagggtgctgggctttgctgtcctggtttgtggtggctggggagaggactcccttttcttagagtcctgtgtgtgcctttgtgagcaatgggtgccaggctctggcatgaggccgagctttgctactggacttctggcatgagccactgagaccttttcccttgacatttagcctgggtttggggaagtttcttcctggttctctgaccttcagtctcattggctcaggacacacctaggtttcctccttgaagctcagacatgtaaactttgcaagactgtgtcccaggaggttgaaatccatcatcaggctcactctctaagcctaaggattagcctggggaccaagcccagccctgaactctcctataaggccctcctcatccaggtcaaggtcatgaggggaacaggtgtatcctggccagcttctagcacggcctatagtaggtctcttggttggtccaaaggaggcctggacttgcatgggaggcaggagagagaagccaccccatctaatccagtcttctccttttaaagatggaaacacttagggccagaaagaaaggatttattcaaagtcacgaaacagctggtgagtggcagagttggggttgcagaacttaggttcctgactttcctctagcagtctctccagaggaacaagtccctgcttcctaaaggaagaaaagaatccggggagtggtggcagtgggaatacatagagcaagggcatctctgaaagtagctcccaaataacctgataaatacctcggatagaggcaaggctacacccctccccctgcccccactacacacaaacaagatcctcagctgaggactcagagcaggagtaagggcacccctatcctccccatggctttgaaaagaagaaagaggggaaatttggagggatggtcaagttgatgattgaagagacaaagtagtgtaggaaaatctcaatgtttcttgcacagtcatttgttgaaaatgtgtcagcaagtacaagcccatcttaaactggcaatgagacatctgaaatagattatttaagccagggaggcagtattgcaaggaagaacatggctatcaacacttgtttgtctgactcagaggaataaaacatagtaaattttgccttagcgggccacccacattcattgggggaagaaacaattgaggtggggggaaaacagaacagatgaaccttcatggagtttcacaagagtccacatggttgtgtcccttattttcagaaaatgtgaaattggaaaatacgcacttgtgaaagctgaagatgtcacagaaatcttcagaggatttatttagatggtcgtatcctccgctgtcaactggatgaatcagtgtgcaatattttgatgtgaatgtaaccgcctattgggccccatttactctgtgcccaccttgggctttgcttctctctaagcatctttacctgctttttctttttatctaggatatcctttctcttggctctccaggtttaactcataagttttcctctttcccaaagcctctctccctcccttccaaatggaaataatttctcttcctttgaatttccatagcagctcatctgtacctctctcatgacacactttctacatgggggtagagcaatttctgtgcaggccttaccttttctactaaatgaagcctgctgtgggagaaatctgtgtccgtgttttctttgtactgcccacagcggctagcccattgctttgggcattgtaggcactcggtaaatatttgttgaatgaatgcatgagaggttgaatgaatgcatgagagaatgaatgaatggaatttatcctgggaacacacattttgcatagtgaggtatgtgattaaacaaacaaaaaaaaattgtcctaagacaatttgtctttttatgcagctgccctctcagtctcctagataagttccgccattctaaggcaaaagcttaaagtgtaataaaaatttatctaattcacgatcaagtgaaaatactttgggcccagagccaaagaatattattggagtgaactttttttaacaccctaaatttaaccagctggaattctttttttaagtaccatcctattcaaccttttgaaatgaaggatttgccttttagtgggaaatctgcatttcaacacaaagatggaacacaatgtctttggcttagttgcttttcagaaaagcaagattttttttttttggaattatatgctttgcttatgttaaagacacagcttgcagaaaaattttgtttaggcctgacagattggtggctggcatttttatagataaaggggcacgcaaaatgtcatctctacttcctccctttattgagaaaaagcctaggaggagaactcttaaaaggtgaagttagtaacctgttgtttgagtaatcaaggctctaagaggatagcattgatcaaaaaagagttttaaaatgagtgattgatgttattaaagtcactggtgaagtatcaaggaatctaaggaccatgagagagtttcagggaagaaattctatattgtagtgtctataattattgctttcttttgtttttgcagaatacactttttaaagaacatcaggatttggtaaaacagccagtaaaaaagcaatgaaggaaaaaaaatgcacatgtaaatgctcatttctagaacaaaagagagtgcgattttgacaatatcagaaggttaattaagaagtctgtgagtgatgataaagctggcacattttcattacagattgacacaactcaagtcacaggcatagctaatgtttgctctataatactctgataagtcagagaatctaagtgagaagaactggtatctatggtaaacatagggtcaagagctagatgcggctgaatagaaaggacatttactttgcagttaggtaaagaagcctctagctcagactagctgcactgttgttatttgtgtggcttgaacctagtaatcggattcagaactggaatgggttccttcagggtactttacaaacgttcaggatgcattttaagtgtagtctagaaggtggtacatggaagagctgagggacttgaggattatggactgcgaaaggactgtaggtagtcctgtattttggcctgtcaccaatatagagacccctcctcatcatagtgtcatccattctctttttgaagacccagggtgaaagaaagggggtcacagtgtcacgagatagcccattccacgtgggacagctctactgcttttgtgcctgtctcactgaaaaaaaaaaaaaaacagggaaattatctaaaaacatatgtttaggaaatatacacacattcacacacgtacacagacacatatgcacacactcacatatacacacacatgaacacgctaacacacatgtgcatgcacatgctaacacatgcacaagcatacacacacatgcacacagtcacaatatacacacatgcacatgctcacaaacacatatgcatgcacacgctaacacacatatgtacacataaatgcttgcaaacacacacacacgtacattttagtgaatagcacacatctatgtactcctgtggagagtcctgtggttttaatacctgttaaagttgggctcccaaagcagtcattaaacgtgttggaatgatgctttttgcttagctgttttggcacatttggaaatctgcagtattacctgttgattagtagacagtaatgtggctgtattacacacccagtgattagtttcagaaacaaatagcatgttaatagtcaaggaatctttgagatgttcttgaggaaaccaaaaaacttgatttaatgacttaaattccaggaacatcccactgggcttagagctctttgtcaaaagttggtacccaatatatgtagaaatgtaaagtgaccaaatgtataacattaaatcaaagccattcccagtttgctgcatattttttaatgaaacctgaaaaataagagtcactatttttaaattcagccataaggaaactttgcaacctaataatgtgtaaggcatttctgaggccccaagtggaaatactgggtctagagagacctttatgaaatagaacaggttgaaacaccttccaccagaaaagtgtaagacatttgaaaaaagattgagtcagaaaagggaaatgtgtcccatttgagagaccagaaagggaaacaagagtccagttcctgctgtgtccgtgcagttgccacagctgcgttcgctgacatgtcggctttaatggaagcagtgaggacacaatctgtctggcacaagctggtttgggtgttgtctcatgctaagaaggccctggacctgatggagagcctggacctgttccctgtccttatcaatgacagacggagggtggaacctgaatttcctaatggagggatccttagggattccctaagcttaatttgtttttgactgttccagtcctaaaggaggtgggtcctggacaggagggaaaacagcctcatggcccatgggtctctgcccagggaatttcaaagcttccagcgttcatacttcccttaccctaagacagcagtgctgattcagcttgagtgtgcatgagaatcacctggagaatttattcaacatagaaggctgcttccccaccctcaatttctgattcagtaagtctgaggtggtgcccaagaatttgcattttgaacaaactcccaggtgatgctgatcgggggtgggcctgggtctgcgctgtgagaatcacttgcctaagagcactaacaaagaaaaaaagaggacataactagatcacccacttcctagccagcaaccagagcccatctctggctggggagaatgaaagcgaaggtgggaaaagaagaggccctcaaccaggggcagctccttttccccaccttggcctgggaaggcagagctgctcctcgagtttgacgctcagaagcattaattgtgatactttactttgcctaagccgtgatgaaataattgaaggcatcatagcaagaagttaagccctagggaggctattaacaatttagcatttccagttcatgtgggaatgtcgattttacttaccaaagagaatattatggatgtgtttagtggaagaagcagcagaatcagctggggtccccagttggctttgctttgaccctcttcctgaaggaagataaatgcaagggtgagtctcacaaagacagtgtgctttttttctaaagtaaatagcttcttaggctgatagaaatgtttttagctgtctaattctgcaggggaagcagaggtagagggtgaacacagcaaaggtgaggccaggaggcccaggcagcagagcaggccttgttttccaattgtgagaccaagtcagttcattggcacctttcgaaagccccatgtagcgctgctgggctggaccctcccccaagacggttaagtactgcttaatggatcagtagaaacaggaccttcttgttgggcagtgaagaccacggcaggagcagcaggggggaagagacaaattcccaggaaagaccactggatcaggagtcaggagattaattctaatcttcacattgtggttaatcatcagtgtagccatgggcaagtcacttaatttctcatggcctcagtttccccatctgtaaaatgaagggacagacttgatgatagctagggttttttacaacttagaaaacaaaaacaaaaacaaaaacaaaaacaaactatgctgccagatagtcagatgagacctcactttgccacacggccagacactgtagagatctggtcctgccgtcagcttgtttagggctaatgggtttgtagacaagtttgccaacaagagattcatgcgaggggctaggcatggattaggttagcagttctcccatttcttgctggaggcctgctgaagcacttcagggtctcttcccagagtaagtggcagagaatttgaaatttgatactccccatacaaggatccaagtacctgttgcgtttatgctgggatcacagagatacctgggttgcctgtgtttcctaagaaaaggatgtctgttttggcagcaaacttagtgaacggctgaggcaaaaacaagtgcaaagatggattctcagatttctcattgaaaaataccatgacaaaatctgtagtaattttacgccacactctcaattcacttgacgtaaacagtcaaatgtagacatacttgtttgttaagtccggtcttcctgcttgtgttggttcactttgtggtgtttattttgttttgggtcagagaggatgaaatgtctctgtagatgttctcaggctaggtggtgcttccaccagggcttccctctgcaggcctggtaacagcagacctatgctgtctgtgtaagagccttctcagcagcacaccatcgttacccaccaggctccttgcgaaaggaaatcttgtcccaactgccttggctgtgcttggcagtgtgctctatataaggagaacaggatgtattttacacttgagacctgctatcctagagtacaacaacaacacttctaagtgctcttaatattaagctaatggaaaacatactgtttgttcaccatcaaagtctgtttttcttgtctcccgccctccccaatcatcatgaactccaaacctctagaacacacagagcgtctcctgcaccatctatcctccagtctgtctcaagatggacagctacatggttagttagctagaggaggacttggaaaagctaggcacttaccacataaaccgtaaaatccccagattgcacaaaccaaattttcctcttctcaaaaaaatctcagtgctacaaatgtttcattgactattagattcattttattagtgtgagaagtcacttgtcttcaccagagtacaacaaagtgcagtaaaatggtgaagatgggtcagggtttctgggtgctggcattattggaatgctggttctttccttgtcatttaatggtcaaagttatttggaccccagaagtctaatctttatcttccattgctttgtattgtgagaagccacatctgtgtaaggtttccagttgacaggattctagagtatggcccagctcagtccagaaatgcccaggtttcccctatcactgaaggcgctatcataaatatagcatgggaagaggggggcagagggacagagaaagcaaagtgggactctgtcccataaaaaacgattcacaaatctactcatttcctatcagcattttgctttttgcttgggtttgtctataaagtaaagttaatgtatgcatgtaaaccagccttgcagataaaatccccccatgtttccaggctacccacaatattaccagttttccccttgctgcttacacatcttctttccacaagacaataatcaaacaacaacaaataaataagcaaatgaaccaaagaccacctctcccctttcctaaaacaaaccctttcacttttgtcaaaaagaccgaaattgaaaacaaaacagaaactctgggaaataactcaccactcttcttttgtttcaggccttgggcctgttaactatctgcaaggctgttgtaatgatgttgtaatctattttaatggaattgaaatgtgatatcctgtggtttatgatgcacgttgtttgtagctgtagtgcttgattttgggtttctttcacagataaacttctgcactggaggggcctctcctcccctcgttctgcacatggagctctaatccccacgcctgggatgagtgcagaatatgccccgcagggtatttgtaagttgagccttatttcttctacaaatgtccatgtgtatagagatgagaatttctggaaattgcccttactttttaagtactgaaggagttacttccaaaatagattgtcatatgtattattccattactcacttggcagccgctccccactccactcagccccagagggacttcttccctcccctttttctttcctcactggaggctgggagctgatagtagctcatccctgtgggtcttctccccagggtcttgtcttgctccgtggctagtgattgaagatgcctgtgcctctggagcccattttattactggacattcactcctgtggcctcatttaggactttgggtatagtccatggcacacatctttagccaaggccagaatcaaaaggagtcagtttagggttattccagagttattccaatgcatattccttatgtatttacatgtgtatttgaacatagtatatgttgtatattcatgcccacacataattttgactaatttttctcctggttttagagaaaaatgcacatcattgtagttaaaatgtgaaggctctactatcaccaccaccaccaccaccatcaccaccaccaccacaaccaccactgccaccatcaccaccaccaccacaaccaccaccatcactaccaccaccaccatcaccaccagtaccatcaccaccatcaccaccactaccaccaccaccaccatcaccaccaccaccattaccaccaccatcactaccaccaccaccatcaccaccagtaccatcaccaccaccaccatcactaccaccaccaccaccaccaccattaccaccaccatcactaccaccaccaccatcaccaccagtaccatcaccaccagtagcatcaccaccaccaccaccatcaccatcaccaccagtaccatcaccaccagtaccatcaccatcaacaccaccatctccaccaccaccattaccaccaccatcactaccaccaccaccatcaccaccagtaccatcaccaccagtaccatcaccaccaccaccaccatcaccatcaccaccagtaccatcaccatcatcaccaccatcaccaccaccaccattaccaccaccatcactaccaccaccaccaccatcaccaccaccaccattaccaccaccatcactaccaccaccaccatcaccagtaccatcaccatcaccatcaccaccagtaccatcaccatcatcaccaccatcaccaccaccaccattaccaccaccatcaccaccaccaccattaccaccaccatcactaccaccaccaccatcaccagtaccatcaccatcaccatcaccaccagtaccatcaccatcatcaccaccatcaccaccaccaccattaccaccaccatcactaccaccaccaccaccatcaccaccaccaccattaccaccaccatcactaccaccaccaccaccatcaccaccaccaccattaccaccaccatcactaccaccaccaccatcaccagtaccatcaccgccatcaccaccaccatcaccaccaccaccaccaccatcaccaccaccaccaccaccatcaccaccaacaccaccatcaccaccaccaccaccactaccaccaccatcatcaccaccaccaccaccaccaccactgccaccaccatttacttgttcaagtgagcttttatagtagggaccattttatgaaacttaaatttgtccatttatacaaatgttttctgaaagatactgttttagaaaataatacagtttgcttctctgtgtaggaacacatggtatgaatcatgcatggctaaaaggttagggggtgggcagtgattccaccctaaacacaaaaaagcaggttcaagaagaaaagaagtgtgacatctaatttttatttgaaagtaaatgaaaaataacctgctgtggaaagaaaaaaaaagaaaaggaaaaaggtcatggagagagaataacaaagagcaagatgccagagttaaggctctaagggggactgtttttagatgggagggagatgacacttacccatcttgtaaatggtatctgaagagcagggcatgcaccctgagaccagattcaaagccagttgtttatttttgttaactcctaggtaatcctaggtaacaaagagttattgtgtgaatttcataagccctcaggtcctgagggctgggtggttcaggggttaaaagcacctcatctgctcccttcccccaagctgggcctaagcctgggttaggtcacagattgcagaaggtttaggaggttgggctcacggtttctagtccctgcatgctggctgggtggggagagctctcctgttgctgggggcatctggggcctgcatggggctgtggaaacggagccacttttggagggaagggatagaagggagttgagcagttcagaggagggtggagttgagaggccaagggctgttgccagggaaacatagttctcggtcttcagcctggtcttcctgagggctgggagtttgatttgactggtaggaaagtctgagcttgatagggaacccctgtcctctcccaccttcccacaaagggagggtacatagtttgctggtgcccctgctggcaggaccaatttaggagtgaccagaacaaggtatgtggaagtgggttgtgggggtccagaaagctctagaacaaacctgatgcccattccacttggcggcattaacctgctgcccctggcttccagagctcatagcacttccctgtggccactctgctgtgtgccagtcacccctgctctttaactagagcctccttttggcctgggttaaggcctggactgggaccttcctctggaagccgttcggggtgtgtaatgtggttagtcattaccctcagtaattaatcacccctggtagtaatgaaaactcacattcacattcgacctgatagtttacagagggcttttatatacttctgtcatttgaacttcccaacaattcttacaggtactgtttttatgctcattttacagataggaattccaagactcagagaaatcaaatgactatcccagagttacaatctagtggataatagagctaggcctccagtctcagacctccttgttcttctgaatcttgaggcttagatcacatgactttttcacattggtgacatactagaaatgggggtcattccttcccataaagtaaaatgaaataaaataaaagccagtaggtgggctaatagctgattttaacccttttgatgtctcaagttcctatgcttaggggccaggtgtcagtttattgctctaaatcaaaacaatccccgtaaatgcccaatgaggctctcaaattgagaagttgattttcatcagagtaaatgaagaatattattatattttacacatcaataaatcaatgtagccctaattttgccacacaggaaatcaattccagtctttctaaatcatcaaagatgttatgaacaaagtaatttcacaaattatggcaagtaacacatttattgatgactgcagtttaggaatttagaatctgtgagcactgtaatataatatggtacaccggcatgagctgagtgaaatacagattatatggtgaaattgtaatgcatcatttgctattagtggactggtaataattaccagtttcaaagcagctctctccatgtaatctttagtctcaatcgtaacagcccttctcattgacattatgattacactagctgccctcatgatctagaatatctagttgatgggaatactaaaatgcgatagtgaaaactgtatgttgtatgctcattataagataaaatgccattttctctgacctgatgtatgagagagaggggaggataacatcacagtgttaacatactgtagcatgatcacataactggctctgaaaaaaagtttaggatgctcagggcagcaaaataaaatggacttttctcatttaagcctttttgaaaggatacaaatgagatccttgatgtagtgctgtatgccacagattttggcatttatcaatgactacaattcatggcacatgtgaaaccagcaccactaattatgagtctagtcctggatttcaatcgatgttttataaggtaaaatataattttaaggcatttggagtgatgaacgtgttaaggacttggattatcagacaaatctttttacttgcccaactcagatcgtcaggctaaataggaatgatagtcacccagagatctagggaggacaaggaggaagccacagaggatcatgtagttggaaccagatagttttttttccagcctatttgggacccaagttattgttcaacaacaacaaaaaatttataaaaatgttctcaatgaagctttttatttccctttgaagagaggaggcaaacaaaaataggcagataatgtgatactaatgtcagcgttttctttcaaaatctttctgccttttttcccccttccacattagacaaatgtttgaaacctaattttggtatcttaccatctaatcttgtttaagagatttacccaggagtgagatatattgagtgggattataaatgcgttgtaaagtaaattacaaggtcagggcaggagtccattatttagacaagtgcttgagcgaggctggcttattttggaataccagtgtttgggggctcctgagaagaccctgccggcttttctttctgacttgctaaatggaggcatcatataattgattaattcctcattctcactcttaacctccctggtagattttttttttttttccttcttagaaagttactgacaaatactagctgtggccttaaagaactcttgcagcccttcttttaaaagaaggagaaaagtttgttatttctcagttatattttaaggctttttttttcagaatctctgggaagttttgtttttctcatcctcgtcctttggctaccattacttctgccctttttaatgttgcagttgactagtaaactgttggtcagttattccatatatatatatatttaatgtagctatctccccatatatatttaatttagccatctccccaaatgaaatattttgtgaagtcaagctggcccttctttgccaaagtggcatttaccactcttgggttcttttcagcaagggaaataatgtgacttaagcagggcccctctccagacggcttggctactggccagagttgactagctgaactgtatctttctgtttctttctcaactggagctgagtcccagccgagggcgcaggatgttgtataatttggttcacgttgttagcctctcaaaacaatgaggaggaggatagtgtagcatttctcagcctgctgcctgtcatggcgctggctgttttaactgttccttaaactaggatgctgtgtctgcttaagtcggcaccagccactcctcctaacttttccagacttgcatttgtctgaccgggggacaactcctaaagattggatacagcctatccgttaaatctgaatgaagtttttctttcagattttttaaacattctttgagataaaaatggacgtccccatggggtgttgtggaaccaaaattgggactcactgatcctcccacagtctggggtgtgagaatgttgctagtcttttttccacggaagtattttatgagtaccctctcattttaacaatatcaacaattagtgtgtttcaggctaatgctgaaagcatctttagggccatagaacattgtagtgagttgaccttcttccccttttttgatacctctatgaaatgtttgcctatttagaaagttcacctgtcacccaggggggaatagaaagctgggatttaggaagccaaaaagtttccttgggtcaccttgtccaagtttctcacttaacaaggaggaaacagaggcacatggagatgagatggcttgccccaaactacagctgatggaactggaaagtttagaagacatttgttgaggtgcctagaatgtagggaccttcatcctcaagccagaactggtcaggatttttctgctttggggattggatataaaatttctagaactgagtttaatggcaggaagatcaattggaccaatatttactgggtacccatgctcagacgtgccaggcacagggggtaggtcagtgagggcttaggccttggggttgaggggtgggggcagggaaggctggaggtggaacataaataagcaattgctgatgcccgcctcagtgattaaacattgatgttggtgttgtattattttgcaggtaaagatgagcccagcagctacacatgtacaacttgcaaacagccattcaccagtgcatggtttctcttgcaacacgcacagaacactcatggattaagaatctacttagaaagcgaacacggaagtcccctgaccccgcgggttggtatcccttcaggactaggtgcagaatgtccttcccagccacctctccatgggattcatattgcagacaataacccctttaacctgctaagaataccaggatcagtatcgagagaggcttccggcctggcagaagggcgctttccacccactccccccctgtttagtccaccaccgagacatcacttggacccccaccgcatagagcgcctgggggcggaagagatggccctggccacccatcacccgagtgcctttgacagggtgctgcggttgaatccaatggctatggagcctcccgccatggatttctctaggagacttagagagctggcagggaacacgtctagcccaccgctgtccccaggccggcccagccctatgcaaaggttactgcaaccattccagccaggtagcaagccgcccttcctggcgacgccccccctccctcctctgcaatccgcccctcctccctcccagcccccggtcaagtccaagtcatgcgagttctgcggcaagacgttcaaatttcagagcaacctggtggtgcaccggcgcagccacacgggcgagaagccctacaagtgcaacctgtgcgaccacgcgtgcacccaggccagcaagctgaagcgccacatgaagacgcacatgcacaaatcgtcccccatgacggtcaagtccgacgacggtctctccaccgccagctccccggaacccggcaccagcgacttggtgggcagcgccagcagcgcgctcaagtccgtggtggccaagttcaagagcgagaacgaccccaacctgatcccggagaacggggacgaggaggaagaggaggacgacgaggaagaggaagaagaggaggaagaggaggaggaggagctgacggagagcgagagggtggactacggcttcgggctgagcctggaggcggcgcgccaccacgagaacagctcgcggggcgcggtcgtgggcgtgggcgacgagagccgcgccctgcccgacgtcatgcagggcatggtgctcagctccatgcagcacttcagcgaggccttccaccaggtcctgggcgagaagcataagcgcggccacctggccgaggccgagggccacagggacacttgcgacgaagactcggtggccggcgagtcggaccgcatagacgatggcactgttaatggccgcggctgctccccgggcgagtcggcctcggggggcctgtccaaaaagctgctgctgggcagccccagctcgctgagccccttctctaagcgcatcaagctcgagaaggagttcgacctgcccccggccgcgatgcccaacacggagaacgtgtactcgcagtggctcgccggctacgcggcctccaggcagctcaaagatcccttccttagcttcggagactccagacaatcgccttttgcctcctcgtcggagcactcctcggagaacgggagtttgcgcttctccacaccgcccggggagctggacggagggatctcggggcgcagcggcacgggaagtggagggagcacgccccatattagtggtccgggcccgggcaggcccagctcaaaagagggcagacgcagcgacacttgtgagtactgtgggaaagtcttcaagaactgtagcaatctcactgtccacaggagaagccacacgggcgaaaggccttataaatgcgagctgtgcaactatgcctgtgcccagagtagcaagctcaccaggcacatgaaaacgcatggccaggtggggaaggacgtttacaaatgtgaaatttgtaagatgccttttagcgtgtacagtaccctggagaaacacatgaaaaaatggcacagtgatcgagtgttgaataatgatataaaaactgaatagaggtatattaatacccctccctcactcccacctgacaccccctttttcaccactccccttccccatcgccctccagccccactccctgtaggatttttttctagtcccatgtgatttaaacaaacaaacaaacaaacagaagtaacgaagctaagaatatgagagtgcttgtcaccagcacacctgttttttttctttttctttttcttttttctttttccttttttttttttttcctttatgttctcaccgtttgaatgcatgatctgtatggggcaatactattgcattttacgcaaactttgagcctttctcttgtgcaataatttacatgttgtgtatgtttttttttaaacttagacagcatgtatggtatgttatggctattttaaattgtccctaattcgttgctgagcaaacatgttgctgtttccagttccgttctgagagaaaaagagagagagagagaaaaagaccatgctgcatacattctgtaatacatatcatgtacagttttattttataacgtgaggaggaaaaacagtctttggattaaccctctatagacagaatagatagcactgaaaaaaaatctctatgagctaaatgtctgtctctaaagggttaaatgtatcaattggaaaggaagaaaaaaggccttgaattgacaaattaacagaaaaacagaacaagtttattctatcatttggttttaaaatatgagtgccttggatctattaaaaccacatcgatggttctttctacttgttataaacttgtagcttaattcagcattgggtgaggtaataaaccttaggaactagcatataattctatattgtatttctcacaacaatggctacctaaaaagatgacccattatgtcctagttaatcatcatttttcctttagtttaattttataaacaaaactgattataccagtataaaagctactttgctcctggtgagagcttaaaagaaatgggctgttttgcccaaagttttattttttttaaacaatgattaaattgaatgtgtaatgtgcaaaagccctggaacgcaattaaatacactagtaaggagttcattttatgaagatatttgctttaataatgtctttttaaaaatactggcaccaaaagaaatagatccagatctacttggttgtcaagtggacaatcaaatgataaactttaagaccttgtataccatattgaaaggaagaggctgacaataaggtttgacagaggggaacagaagaaaataatatgatttattagcacaacgtggtactatttgccatttaaaactagaacaggtatataagctaatattgatacaatgatgattaactatgaattcttaagacttgcatttaaatgtgacattcttaaaaaaagaagagaaagaattttaagagtagcagtatatatgtctgtgctccctaaaagttgtacttcatttcttttccatacactgtgtgctatttgtgttaacatggaagaggattcattgtttttatttttatttttttaattttttcttttttattaagctagcatctgccccagttggtgttcaaatagcacttgactctgcctgtgatatctgtatcttttctctaatcagagatacagaggttgagtataaaataaacctgctcagataggacaattaagtgcactgtacaattttcccagtttacaggtctatacttaagggaaaagttgcaagaatgctgaaaaaaaattgaacacaatctcattgaggagcattttttaaaaactaaaaaaaaaaaaactttgccagccatttacttgactattgagcttacttacttggacgcaacattgcaagcgctgtgaatggaaacagaatacacttaacatagaaatgaatgattgctttcgcttctacagtgcaaggatttttttgtacaaaacttttttaaatataaatgttaagaaaaattttttttaaaaaacacttcattatgtttaggggggaactgcattttagggttccattgtcttggtggtgttacaagacttgttatccatttaaaaatggtagtggaaattctatgccttggatacacaccgctcttcaggttgtaaaaaaaaaaaacatacattggggaaaggtttaagattatatagtacttaaatataggaaaatgcacactcatgttgattcctatgctaaaatacatttatggtcttttttctgtatttctagaatggtatttgaattaaatgttcatctagtgttaggcactatagtatttatattgaagcttgtatttttaactgttgcttgttctcttaaaaggtatcaatgtaccttttttggtagtggaaaaaaaaaagacaggctgccacagtatatttttttaatttggcaggataatatagtgcaaattatttgtatgcttcaaaaaaaaaaaaaagagagaaacaaaaaagtgtgacattacagatgagaagccatataatggcggtttgggggagcctgctagaatgtcacatggatggctgtcataggggttgtacatatccttttttgttcctttttcctgctgccatactgtatgcagtactgcaagctaataacgttggtttgttatgtagtgtgctttttgtccctttccttctatcaccctacattccagcatcttaccttcatatgcagtaaaagaaagaaagaaaaaaaaaggaaaaaaaaaaaaaaaccaatgttttgcagtttttttcattgccaaaaactaaatggtgctttatatttagattggaaagaatttcatatgcaaagcatattaaagagaaagcccgctttagtcaatacttttttgtaaatggcaatgcagaatattttgttattggccttttctattcctgtaatgaaagctgtttgtcgtaacttgaaattttatcttttactatgggagtcactatttattattgcttatgtgccctgttcaaaacagaggcacttaatttgatcttttatttttctttgtttttatttttttttttatttagatgaccaaaggtcattacaacctggctttttattgtatttgtttctggtctttgttaagttctattggaaaaaccactgtctgtgtttttttggcagttgtctgcattaacctgttcatacacccattttgtccctttattgaaaaaataaaaaaaattaaagtacacattgtaagcttcttgtgtcctcatttgacacactctgtaaattacttgcaagaaaataacaggttttaagagaaggccagtcagtctttttcaggattatttctatgggcattctgatgcgtgtattataccctaaaggaacataaagtacttactatattaaaatagacatatctcaaaccctggacatagttttaaggctttccagtttagaatagttttcaagaaatggaaggtgttttcagtctgatgttaaaaacttactccatctcttagcagaaatccattcaaacataagtgaaaaaacttgctggtaatagcatcttaaacttttatttcctttaaattttttgctgttcttgttgtctaaaagttcttttctattctcccatccttgctttatcttagaacataatgtaaaaaagatttttttaaaaaaaatcagctctttggtttccatgtaagagtcttttctcataacaaaataaccccacttttgaaatctaaaaatctggaaacaaaggcatcaggttttgttttgttttgttttgttttgtttaaaaaagagggagaaaaaaagagagagacgaaagaaaagaaagcagccactaggggtgtagccagacatagtgaaatctttggaatcagccactgatttcctgagatgcatagtggtttgccttgtggttctgagatcccaggaaccctagatgctacagattactttaggtgttttgatagggtcttcctggatgacagcaaataagggcgggaatacccttcaattatcttctgaccagccagttaggtctattttaaaaatccttagaaatctgtgttgtcacttttacaaatactgcatgttgcagcatctatttgctttactaaacacatacctctgtgatatcgtgtccctgttcccagtgtagatgaatgaatacgacattgttcttatttttgtaaaaaaccaaaacaaaagccgttctgttgtcttcttgtggtagcattttttgtcgctcagttcttatgccctagtgcctgtgaggtggccttttcatgtcatgccttttatctgaggcaagaatagttttatctttctaaagtataaagaaagtcaatgttttctgaaaagccagtttgggtgggaaggagagagtggggctagaggaatccactgagaaaggatgttggagaatattacataggaggtggggtggggtgggcgtgcggtaccttgagaacttgatgtttgtcactgaacttagaaaagatatactgtatgtgttttggattaggtttctccaaaactgaatccaaaatgctgctcaagacagatagaaataattccccagtgccatgccagctttagatgtggtgacttcgactccaccctattaaatgtccataaaacctctgtgtgtccctattactcttttattaggagctatgagtgcaactgtgtaggttttatatacagtattcattttaatttctcagtatatgctgctcttagcgtaattaggttttgcatcctgacagacagaattaatggtggatactgtacacttgtctgttcaaatttcttaaatcaaatggggaatggggaggagtgcaaacatctggtgataaatcacagattatgtttgatttacatggtcccaaagttaaataaatttactgggagatgggttcttcaggttacttagtctcctgacttattgacgccttctgataaaatattatttctgaagctgatgaacaatagaaacatgagaacctagccaacatgatatcacttataaatgatattttgtatccagaactctaaaatttaaaatcttaatataaaataacatgcacatttccaatagtaagatgaattcatgatcttttttttttaaatgaggaactactaagaacattaatgtctcttaaaatcctcaagtaagtttttgtaacaggcttgacgtgctgatggaatgttctctacatacctgaactgatgcttaaaatgttctttttaatcttcatttgagaacaacttaataaacaggaataccgcaaattctatttctcacagattttaaaccagaaactcttccagtgcctatattacctccttcctgaacccatttgctatcctctctttgtttaggacctacaaaaaggctggaaccaacacattacaaaggttgctaagaagtgaggtgaacacagttcttcatttgcactggccatggcagaaagtgtgaagtagttgagtttttcccagggcattctgtagatatagaactgtttatttaaataccatttttgtatatgcaataagtacatattgtatataatcataatgctagaagtgagaacttgaaaggaagtggcgggagatggcttaggtataattccaattggagaaataaggaaatgaggtggtttattcacagacacagtttgctgaaaggtactgggattatttcgggccttcctgaaaaggagttgagaagcctcaggccccatcctctcctgcttgtagtactttgctcacagagactgagggaggaaatacagtgttttcttgttttaagcctcttttccccctccgtacacacatgaacatgacttcttatgactgtgttgtaactgtgtgttcctcattacgattctgttactccattgtccctgggcctggtgtgttcaggaatgtacccatcccattctctttttttcagacaacttcccataaaaaaaaaattgtgggaactttgccgatatgaggatgggattggcagagttctctcaacctgcttggaaaaatgtttcttaaaagactgctaacttttaaaaggcatgagccatctagcagattttcctagttgtctcctaaagccctgcatatttcccaatagaaaataaacgaacccattgttagagaaatggacatcagaacacatagagggaattggtatgatgtgtatttactctagggctgctatagctatgaactgtggacatgggttgtccggtctgcacttctgcttgctggcatctcgttatcccattagcccgctgtttaatttactacatacagcacgaggccagtgactcagcctttaggggaatggggctgtttctctctctctctctctctttctctctctctatttcccagcgtcatctacggtcatgggataccattaattcctcccttccaaatgggaaagagaccaatccagttcacacgggtcattgtacttgagaacctaaacttggctgaacacagctcgatggttgatccaaatacgtttttcctttctgtaaagtggcaaaaactatttcaagggagcacgtgtatcagatctttcatagggatggtagaaaaggcaaattaagccatttccccaagtatcctctaaagcgggagcccctaaacccataggggggctgtgcttttaaatagctgtgaacgtggtacatgcccatgatatactttgtctattagaatttgaatattggtagcaggttggacgaaagggtttgattggggtatcagctaaaggggcctcgacgacagtgacttagcgctggactgggaatgggattccccagaacccacctggacgcagcatgcccctcagcccaggtctccgctgctctgctcaggggtgggatgcgtgagagcagctgagatccagaccccgggcctcctgcggcgccaagtcaggggagaggaggccccaggcccctgcttcgggtcgccatggcaacgaggcctggaatgccacagtggtagccctcttcctcggcacatccggactcccagttctgctgcttcaagtcaatgtccacagcaagggaggaaccccggaggaaaataaccactcccttcttcccttcaccattgccttcccccttccaaaaaagaaaagaaaactgcatgtttgaaagaaactacaggcagtttttggtgcaatttgagagcaactcttttgggttctggttttctcttcagagatttgttcgcctcttgtaaatcattggctgctttgacgttgaacttgatgacatttcatgttttcgttgtgctgcttttacatcagttttgattttttgtttctttataattttattattattttgagaaggtgtcccctttccctcctccctctcccgctctcctcaaccaaaggactgtttcttactaagttttctcagtcataagggcaagtgtttccttccaggtgtgtcccgagtttattaggactatcatacaattgggcaggggtggggggacctgggtcctccttggggggacggaagggagggaggcatgggaagacgactcagaggtcagagatacttggggaggggaggctgagtttgaaatcatgcttaagatgccagtggctcgacctgtggttggtttaagttctaatttttaaaaagctagttagagaacagaaaatcattgggccaagtcacacctgtactttttttttccccctcctctgtctccaacctctttctaggttcttcacacacccccattcggcgtagtacccagagagctcaagatgtgtggcagttttcggatggaagctcgagagcccttaagttctgagaaaatttgaagcccccaggggtggggtggacgcgtgccgcccagtcgacgtcagcgtggtctgtcatcctgctagtttgtgatgttttctgacagtagcctccaagaagccgttgtgcgaagacagagtcctgcagagtccttccagcctaggcctgcagcgccattttatttatattttttaataaaaagtaaaaacaaaaaaacagacccacattggaacagtgaatcagtcccatagagagggcccgtggaccatcgctgtcatgagtgatgccctggcccttctgaaaccagccaacctaattacctgtattgtggaaatgcgcatgagtccccaaccccttgtttctatacattctatgttgtcttttaaaaagtgtgcttaacattgacacaataaatgttggagctttaggtggtgtttgcttgttctttaatttttaatgcttataagacaatgaggctgcttatgattttgtacttctgtacctgtttcctacagacacccatcgggtgggtaggaggaacagatttgagaaatgggcaggagatgtaggaggggaactaggttaccgcttatcagatggcataaattttcaaggagaatcaaaatgcaaaacttgggaataaatcatagcaatatcataattaatgtagtagtaatattgctgtttattaatgctgaagtgtggttttcctaactgtctgacttataatttgcataccattaaataatgcataatatggcacgccgaatcctgtttttcaaatatatgcttttggtggctaccatgcaggatttgaatttgtcttttaatttagcttaggaaagaacatcactgggcgagcggtaaatcctaaagaaggtgataaatgtcagtagtttcttattaaatattctaattttaggttcccaaaccttcaggaaatatatcttaatgcagacaaacaaacataaaacttctttagtacttacatcaggaaatttggggcagattttagaggggggaaattataggaggaaagaagttcacatcagaacagacaatcacagcaatgctctattccttagaaattagtgccacaaataagttacatctacaaacaggtggtaaaaattctttctggcccagttaatttgcacagaacttttctcagtttggtattttttactgcttggagatccagaagagaattagaaacaacatagcaaattaaaataggtttgtcaataatagagctcagacacctgtgtgctgtagattcacatacaggccgtgaacctaagtggggaaaatcctacctatccaccttctggctagattacctagcttagtgaaaagatagccaaataattggcatgtgaattatttcctgcttattcataataaataatgactgtcta

SEQ ID NO: 287 - DNA, 25048 bp, Homo sapiens
gattacaggtatgagccaccacgcccggcctgtgctttagttctttacatgaaactccctttctaccttgtgttgcctggcaaaatcttacttacccagaactctgctccggcatcctccgcaggaagaacactttcattgaaccctagcattgtccctaatacccttaatatgtattgtcatagcaccctatgaatttttctatatcactttccatcttatatttaaataatctttttacttgcccatctctcccactgataatctaagctggcagaggctggatcagatcataattatctttctattcttagcgctaggatcaatgcctggcatagcatatttacattttttatttaaataaactgacctgactttcttctggttggatatgttctgagtccctattactaaccttggtcttttatctcagaagttgaaggctcccctggagccagctgcaaagttcccaaagccctaacaaccccacagccaatcagctacagagtaggctgccctgagtcggcctccccaacacaaagtccagggttggagcaggagcaggagagggacaatggaagctgccccgtccaggttcatgttcctcttatttctcctcacgtgtgagctggctgcagaagttgctgcagaagttgagaaatcctcaggtaaaagaaaaatgtagttgggtggctatagtgtgaaagtgttattaggagaaggaaagggagcatggtggttctctgggtacttttcctccacacctagaaagctttccaggaaatcctggataagtgcattttgcctggtagagagtagggaagtctggcagtatccttcagagacagaccatcagtagggtcaccttccatatgttagtaaaaatattatgccttggaatgccaacagtactcctataaattgtgctcttcttgcccttagtatagagataaaaggtatagatgccctcattatttagagctgcttcttcttgcctcagtaccctgacatcttctgcttctctctctagatggtcctggtgctgcccaggaacccacgtggctcacagatgtcccagctgccatggaattcattgctgccactgaggtggctgtcataggcttcttccaggttagttccctacttgcaattcccccaagagccagaaatgttctaccttaagggaaccacagcagccacctgctgctggcagatggcactgcattagaagtgggggtaaagggagacagccacccagtttgatttcatcttgtccattgggacctcttattttcaagacattcccagtctctaaattatatctttctcatacttacttcaagagttctgagcctgtgggctgcatctcctcatctatggatgctttgaagctcaagtcagtatctgcagaaagaatgccttcatggaaccccaccattgtcctaaacacatttggtctatactctcatagcaccctatgaataggcaggggccagagtgaacccaatttatatcatccagcaacactgtttacaggatgccaaacatcctggacattagtcagtgcacagccttttaaagcctttcccccaaatatggtagactctccttctttctctttgccttgtctgaaatgttggaaaatgatggcattttgtatattcaaggtgttaacctccatcttccagattagcttcttgactaagaaaggcagccataaatgagactgcctcattccagcattttcatctttctctggtggtagcatctggaaatcctcacagctgatcaagcccctactctctcatagcagaccttcttgtctgtttccatttctcagttacaactcctgattaccctgtcagttctgcgtacacagttggaaatcactgcaatgagatgcaagtcagggagaaagacagggacaacatttttcaggaatgagaaatctgagctgtagacaaaaacaccgtcagaaagatggggaaggggcaagagcatggaattggaggagtgtgcaataacttaaacagccgccagatgccatcattttatcctccagcaattccatctgaaggagcagaataagagaggaggcctcaattaattattgttcatggcctctagaagagtagataccagctccctctgcttgaccccagatgcaagacgggtatgttagtttcttctcatgctgccaataaagacatacccaaaactggataatttataaaggaaagagttttaattgaatcacagttcagcatagcttggaaggcctgaggaaatttacaatcatggcagaaggaacctcttcacaggatggcaggagagagaatgagcacaagcaggggaatgccagacgcttaaaaaaccatcagatcttgtgactcatgcactatcacgagaacagcatgggggaaactgcccccatgatcccattactgccacctggtcccacccttgacatgtggggattatggggattacatttaaagatgagattttaggtaaggacacagccaaaccatatcaactggccatcttcttttctccttgcacatctcctccttcagcctggggacttgcagggtagaacatgtttgttcctgttaatttcctggagctgctatggataaaggtcccgtgagagcagggaaaatgatgccagcgtctatggaaggcctggaatcactgttcgcaagtggcttctctgctgcctcctgcaggcctgggctgcagagttgaatgcgtgaacagcatcttcatgtgcaaagctcaggtttatctacagtggcaagagagggactgtccttccataacctgcataaacttttgttaaaacttctaagctttcattttaattgttttatttttcttctttttttcttttttggcccttttgatggcgtctatttcatatttttgcattttttcctttcatccacaaatgtaaccaaagccaaaactcaagaggaagagccggtgggaggaaaagccagtttatttgaagatccagtaaaccaagaagacagcggactagcatcctaaagtacatcttggccgggcacagtgactcacacctgtaattctagcactttgggagcctgagggaggtggattgcctgagctcaggagttcaaggctggcctgggcaacatggcaaaaccacatctctactaaaaatacagaaaaaattagccaagtatggtggtgaacacctgtagtcccagctactcaggaggctgtggcacaagtatccgtgaggcagaggttgcagtgacccaaaattttgccactgcactctagcctgggtgacagagcaagactctgtgtcaaaataaataaacaaagtacatcttaagccactaccaattttaggttctttgtatgttaagggcagggtgaagaggagggagttgggatcaagtgataaccggcaaccacaggcatctgggccccagcaagtgtctcaggaagttgggaacttctttgtccttggtcaggtcacaaggcacctataaatctgtagcactacatagttagttgtttacatacttttcctttaatcccagagttagttttaaaaactatataactcctatttttgcctattatctcagtgctctaaaattattctaacctacatgcaggaatgagtaaataaatgccctttaaacaaaaatagagttggttatgttagtttgtttgctatttcaccgttaaacaaattgttcccagaagagttgcttctcatgtgtatctacaacagtgcagccaaactaggcaggcctttatgattttgaggcctctctcagcccctagtaaacttcaagctctatgacaaggcctgacaggagtctcaggctcagctacaatttcgtggttacctattaacttacagagcctggaaaattcaagaatgtcactgccagttaaacctgaattgttaggggtaaatcatgtgttactgggcagtaaatcaaatctatgatttctggtaaacatcatatcatatttcttttgcctatcgtttgtctctgcccttcgaaataaccactgtggtattattttttctcttgtttttaggatttagaaataccagcagtgcccatactccatagcatggtgcaaaaattcccaggcgtgtcatttgggatcagcactgattctgaggttctgacacactacaacatcactgggaacaccatctgcctctttcgcctggtaagttgggtgggtagcttgagctttctcccagattttcactgggttgtggactcataaacttgtgagactggaaaggactctatgtcttttacactaatgatggtaccaaattcagggacattgttgacaaggatgatgactcaattcaagcttcccaaacaggtactgtaatgaaatggaaagaggacaggactgaaagccagggaatggaatttgtggtactgctttgtcgctcaacagccacatgactttgggcagtcacttaacattttttatctccaattctttcctttataaaataaaagagttagactgtattatctctaaggtcactttgagctccaaaatttttatattaaatattttgaggagttcatttatgttcttcaaacatttattaaatacttcctgtatgccctatgcaagataccgataataaaaacatattaaatatattctccagtctcatagatctttaagtatggtaggtattgtatatataatatgcaagtatctataataaaaagagaatcactatgggtaaagttttatcacagttcaaaggatagaaacagtgtgggaattctgaaaaaaaagaaaagaaaaagacaacagaattgaaacttgaaggatagataagtttagacaagctaaagaattcatggccaacgggaaaaaactcaggaaacaataaacaggccaatctcactggatcccagggtacacattggggaaaatgaatataagagaaagaaacttgattaaaatcgtattgtggggaaaaagtagaataccactttaatgagtttgtcctgaatttggctgttactggaaagcccctaaagcctttacatcaggggagtaacatgaacagaaatgtgttttattagattattttgacagcaaggtggaggatggatttttaggttaaaaggcaagagaagagggagcttttgttaggctgacaaaatagaccatgtgagaagtattaagagtctgtagtagagaggtagcaacagaaattaaagaagaggaagatcctgtgatcattagatatcacagttatggaaagcaggcaaagcttaaagccagggtgtctaagaatagtgaggtcatgtgcagaaataggggtttctgatgctttcattggtcattgagttctacttgttggtggaatatcaagagtccactgaaaaagagtaaattgatggaaaagaaaaagttttcagtatttcgggactgaatgtcgtgccccttctagtttccatcctttctttccctttcttttctcattgaaacttctttaagtgtattttgtactgtctttctctaaactagacactactatctagtttatgcccccatcacaccattaaaactacatttatccaggtctgcatggcttccatattgccaaactcaatgaaccctttttaggtcttattttactcaacatttctgtcatgtatgatgttagtgatgacttctttctttttaatgttctctctttccttgaattctaggaaactacttctcctgatcctcctgctgcttttataatctctttgagaccttctcttcctgtatctacaatgctgcctgacccaacactttttacagtctgggtcatggaacccatgctatgtgaaggcaaagactgttctgttcagtgtatccacagagcctagaacagtgcctgctgtgcagtaggtgctcactaagtatttgtttagaatgaatatatgaagaatcaatgaatgaatgaatgaatgaatgaatatgttcttcttaagaagtacaattcttttgcatattccactattatgtgcttgcggaacatttagaatattttatccctagtctggacttctctcatgattcaaatgtttgctgggtatataccctcataagcactatactcttaaaatgttcaaaactgaatttattgtctgcacctgctaatcatattcctccatctaagatactattttattaagtggctatgctcatttggtcttacatttttgccagttgtatcttctatcttgaatctatattctcctccactccttctacctcattctgtatttaggctcttagcctaagcataagcaatttcattagcttctgaacagatctccttttactactttatatacagtttctaaaatggtatcacaatgatgtatttaagatagaaatttggccatagcactcttctctttaaaactcttcaacatttctcatttcttaaaaatcaaaaatgagatatttaatgttacaaataggctttgctggcctgccccactgcctgcttctctagtcctttttccatccagcttccaccctgggctttatcctctcagtagccaactatacacataatgatcatccaattccatgattttgcctagactattccttctgtctagaatgccaccacccgccaagggtcccctttcacctagcctcacccagatgactccttctcatactccagtgaatcagttcaggaatgttacccttcaggaaatatctctggaatctccaaatgggcctaagcattcctctatatgtaactccttatctctattttcatataccattttataattcatatcatatatttacgtatctgtctcctctattaccctcttaggccatgacctattcaaggctggaaacgatgacttattcatctttgtattcaaagggctataatacacctctggcaccttaaaggcactcggagggtgcttggggaactaaactcacctccaaaagcatgtctgaagttgtgtgagctcccttcagcaacccctttcccacctgcacagtggttgctggtttgcattctcaccagtgtgaaataagattaaatcaaattcttctgtgaaaagctttgatgaggaatatatggaaggttaggcaaatgcctttcgtgttgccattgaaccactggtagaaatccttcaatacaaaaattctaataagctacactccacacctacttctttctcagtttttcgtttgtcggtcttataaggcctgatttaaaaggcttagtaccaccaagatacgcacatggggaagaaaaacaagtgccgttgcttccaacatctctacaggtttaacatcctctaacaggagcactggcgttgcttacaatttattcctcataaagcttcactgatgacttctcagtttttcagtcttctttaacatctgttttttgtttaccgctagtgacggacctagtctaaatgaactcttgggacctctgtgggcaagattatttatgtgccataccagaaaacaaacaaaatggttcctgccctacttcactggcagagctggaagaagctcaacttttgtcatgccagctttcagataaatatttttttcacagtttacactttcaaaactttagtacatattttaataggaccattattcaagagtttggagcacttttttttttttttttttgaaaagggaacatcaaccaagactatcctattttacactgggaaacgtgaacctattgaaaattttctggatccagtttgttcggtttgcttgtttgttttcagagcctaatctatgataggcactattacaatatttgaccatttaattcacacaagaatctgatgaagtaatttttattattcctgcatttttaataaagaaatttccatgagagaatggtttagttgcccaaaatctcacaactgtgaagtaacagatgtctgattcgtacccagcattgctgtctacaaatcataccctttttactatattatagtggctttcttaagcacttgaccctgaagataaactttgtttttacactgaattctatctaatgtccctcattctaaagcctactttttttctttcaactattttctcttaatttattcctctagcctcctagcattccttaatcaaactgcagaattatttatcaagatttaatctagacattatatattgtctaaatttacaaaattttccattttaagaacatatttagaaataagctgaaataatgattaactgaaaaaataacaataaatggatattactcatgcttgaaatgttggagcaataaaaggccagccagtgctgtatttatgcaacataatattctccaaaaatagtgcaggccaactatataaatgtaatcaggaagaatttaggtaaaattcatgaaaccataagttgcatataacagtcttgctgtgtgagggcacagcctgtcttttgtgagtgtaacagcatataaactctcaaatttttcaacaggactcttattgttgccctagcagagatgtaactcccaggttaaataaactatgagcctgtcctaaaatggaatttgaaatattatttgaatgtttaccctgctttggattttttcagtcactactatttaaagaaacataattaacctaactttgacctaatgggatagtaatgaaaacacagtgcagtcatcctttattccttttacagttatttattgggtaactattataagaaatttacctcaccagacaaagagaatcagaagaaactcgtgcatgagaataaactgataagaaatgcaagaagatatgtcagattataaaacattttttattttattctattttattttatttcattttactttaagttccaggatacatgtgcataacatgaaggtttgttatatcgtgtacgtgtgccatggtggtttgctgcacctatctacccgtcacctaggttttaagccccgcatgcattagctatttgtcctgatgctctccctcccccagccccctatccccctacaggccctggtgtgtgatgttcccctacctgtgtccatgatgaaacttttttttaaagtatatatttattaaatatatgataagctgaacagctttaaaaaaacaaaccgaggacgtgaggacctttgtttaacaaatgatttctcagtgccaccaaagacatttaatactataactgtggcataaactaagacaattttaatacattttataaaaatctgggttgttagaaaattccatgggaattcaaatgaatatagctgaaatactaatgaacagaaaatgagtgattggtatgatgtagtgtctacaacaacaaaaaaaatctacttcagatactcttgaggaaactcaaaattatgttttaaggtagcaatatttccagtttactatttctgtttttcttctgctgcctcttttctctgaaataaaaatatgatattttaagtaaaattctttccataaaactgaaaaaagacattttaaaaggtttttccaactcttggttcctgggttggattttctttccagtgcattatgcaaataattccctttacagagggagatttcctgttcaaatgttgcttccagaaaccctaaacatgaatgttccagagtttattagtttaagaaataatgaaagatcgggcatgttttcttaaaagaagtacaacaaactggagagactgcaggagagtggcttttattaaagctcttttgcttcttagagaatgttatcaccacttaacatcctctgcctccaatttagtgcattctttaagtccagaaacacccagagtaactggcttttcttgttctccctgttctgggaagtatgaaggactgcccggaaaagagtacagggagggggggattcttgatccatgcacagcgatgtgagctgaggtgcaggcaccagacctaggaattcctagaaaaatagtcaggaagcatttagacacatcaaatgttaaacgagtcctgattatgatgataatgatgatgattttggtggttgcaatagcaaagccttaagtatgaaggagacttgccagctggaaatacaggtcggtagcagcattaagtatctagaggagctgcaaatattatttttttgtgtgctcattttatttctttactcattcgtcttgatatgggcaagggaaggggaaggaggtggtaggagggtgggcaaggatctacctaagaccttttctcttgctttcatgttttgttttgttttttcccaagctttctactcaaaactttgtgaatttttaaacaattaaatatacacaaggagttcatttttaccctgtggttttgatttgtttcaaaattcttttttagaaatacaaacttttctgtacctcaacatttatttatttcataaatttaaattgtataaagcagtcccaaaataaagagtgcttaaattgtcatctgaatgaatggctgcaattttatgcctcagtgcatatagcaggcactcggcaaataattatgaaacaaatggattggaagagaatgactagatctatccagaattaaaattaaccataaggggtgcattgtgcatctccagagttcttattgcttttagttaccccaatgggagaccctcttgaagaaaagaggtgaaataggaatcatcaccgggatgacaataaagagcaatcttagattcttgctgtttagtgactttaatttccctttgcctgaattccctcctaccttaactaacatgagatttgcttctgatcttactgggtagactaggagaaagtaccttggggaaaaaagggtggttctgatccaaggcaagatctgattgggcaggacctatacagatagcacatggaggggaaagggttaaggagatgtccaagagcagatggcctaaggatctcaaaagtgatgcaaactattgtaggaaatggacaaaattgttcaggagctgatactaataattttatctataggcgtggatctatctatggatggtggaggcactatctttgtgtctttatgggtatgagtagattggggtgaggaaatagaaaactgagaacaatgattggaagaatgaagtcctatctttcaatatatctgagtgtggtggaaagcttgttctgaaatacaaatctgggataatggatcatgtagctagacaatcctttccaccaaagactatttttaaaagttaaaatgtgtgtgcatgaatgtgtgtgtaagtgtgtgtgtgtgtgtgtgtgtgtgtgtgtgtgcctgaaggcattagagagccagtaaaagagggaaaatatctaggtcaagatctggaagaagatgaaaaccaaaaaagatgaaccctgcattgaggactgctttttgtctagacggctttggtcagttctagaagcagccaagaagctaagaaataaatttgcattttgagatcctcaggagttgaaaattaaatgttggagtccaggcctcacaaggggaaataggaggtgaatctagtacaacacctttcacatcccctttgaatcctacagagctgtacctaaaaacaggaatgaatcatagtagataagccctctcaagggctgcagcacagatgcaaatcatttcagcccctgaaattgaattagagtgattttagatatatatatatatatacacacacacacacatgcacacacgcacacacacacaaatatacacacatacgcctacacatatgcaaatatatatacatgtggaatatgcataatccactcttagccatgccatagtacatctaaaacttaacaaaagataaaatgttaaaagaagtcagagaaaagagagactatcatcaaaatactctcaaagggacaaccataaggttcacagctgacttctcaatagcaacagtggaatgcagaatacaaagcattatatctttcaaatactgaaagaaaatcactgccaacgttagaattctacccccagcaaaaacagccttcaaaaataaaaggtgaataaatatatattaaacagccaaacggggagaatttgtcactgaacacctccatctcatactaaggaaaatagtaaaaggtcttctctaagcagaggaaagaaaacccacacagaagctaaaaaatacaggaataaataaagagaagctaaaatgcaaatatgtgcataaatgtcagtgtatattgaagatataacaaaaataataatatcctgtgagatctggaactaatcatgtgtaagtcttgaattagagccagaaaattgaatttaaaagaggtaaactgtatttgaatattctaatgtttgcattgtccaagaagaagctgaaattgccaattaatattaggttctgagaagtgaaaaaaaatgcatgttgtataatgtattctggcaatccctgagagaataattaaagcctatgtaacttctaagccaataaagggaaagaagaaaataatataaaatactcagtcaattcaaaagtaggacagaaataaagaaaaatagcatttggaatacatagaaccaatggaaaatgcataattaaatacaccagtaatttcatttcgtggaaataatccaattaaaagacaaagattatcaggctggattgaaaattgcaactatgtgccttctacaagtgacaaaagtaaaacacaggatggagctataccatgcaaacacttccaaaagaaagctgatatgaatatattaataccaaacaaagtagacttttaggcaacaaggattcctagagagaaagaataacagttcataatgacagtttcaatttgccagacagatttaataattctaaatttgcatttatcaaatacatgtactgatactatataagcagaaactgacaaaattgaataaaaagatggctaaagccacaacataatagaaaaatttaacaccttttttttttttggagacagagtcttgctctgttgcccaggctggagtgcagtggtgcaatctttgctcactgcagcctctgcctcccaggttcaagcgattctcctgcctcagcctcctgagtacctgggacaacaggtgcatgccaccatgcccggctaattttttgtattttcagtagagatgggctttcatcatgttggccaggatggtctcgatctcctgaccttgtggtctacccacctcagcctcccaaagtgctgggattacagacgtgagccactgcgccaggccccaacactcttttaaataaaataagctggttttaaaaaaagaaagatatagaaaatttcaactataaaattcaccaagtgacctgataaacatttatagaatactgtattcaaaagctgtaaaatatacttaattttaaagacacaaataatacaaataaaatataaaaataaagctagaaatcaataagaatataaccagaaaatcttacattttaaaattaagaaatacacttctaaataactaatagtttagagaagaattaagaacaaaaaattaggaaacattttgaactgaatgataaaaattctacatatcaaatttatgagtgcatttagagccttctaaggaggaaatgtatagatttctatgtattttttgctacttacaaatttaaaattggccagataataggattttatatcttggaaacataaaaacatggaatgacccttaatttatgatataactgaaccccatcacttacccaaagttagcctttgggtcagggggtttcctcactatagttccttccatggtttccagaaagatgttagtgaaaaggggtcctgatccagacctcaagagagggttattggatcttgcgaaagaaagaattcagggtgagtccacagagtaaagtgaaagcaagtttattaagaaagtaaaggaatgaaagaatggctacaccacaggcagaacagccccaagggctgctggttgtccatttttttggttatttcttgattatatgcactaagcggtggattatccatgcctcaccttttcagaccatatagggtaacttcctgacattgccatggcagttgtaaactgtcatggggctggtgggaaggtaacagggacgacgaccagaggtcatgctcctcaccatcttgattttggtgggttttggccagcttcttcactgcaacctgttttatcagcaaggtctttatgacctgtatcttgtgccaacctgctatttcatcctgtgacttagactgccttaaccatcttggaatgcagcccagtaggtctcagctcatttttcctatcccctattcaagatggagttgctctggctcaaacatctctgacagcgataggctcattctggggagaaaaggagcacataggtcaagtcaggggttgctttctacatttttttaattaaaaactggaaaaccacaataagatatcacctcaccccaattagaatggctatcatcaaaaagacaaaaaataacaaacgctggtgtggatgtggagaaagtatttttatacactgttaatgggtatgtaaattagtatagccattatggaaaacagtatgaacattcctcaaaaatttaaaaatagaactaccatatgaaccagcactttcactattggatatacatccaaaggaaatgaaatcaatagtatgtcgaggagatatctgcactcccatgttcattgcagcactattcacaataaccaagaaatggaatcaacttacgtgtccatgagcagatgaatggagaaagaaattgcagtacatatatacaatggacactattcagccataaaaaagagtgaagttctgtcatgtgtaggagcacagatagacccagaggacattatgttaagtgaaataagccttgtacagaaagacaaataccacatgatctcattcatacaagcaatctaaaaaatggatctatagaagtagagagcacaatactggttatggaaagctggggagcggagggggaagtggtgatggaagagggaagagggaagtggggacagggagaaattggttaataagttcaaagttacagttagatgaaaggaataagtttaggtattctattgcacagtagggtgagtatagtcaacaatattgtattgtaatttaataatagctacaagaaaggattttttaatgttctcatcacaaagaatatttgaagcaacggatatgctaaatactatgatttgattatttacacaatgtatacatgtattgaaacatcacactataccccataaatatgtacaaaactgaatagtaggttaaaagtaaaatataataaaataggaaaaagacttcaaacactaagaaaagttttcaccaatcaatttgtcaataacaataatagcagtaaaactaatggcatggcagtattatttgcaatatagttggttctgtttttctgtttctctgttcaccagaaaaagagaaccaacaggagataggtaatatagatagatagatagatagatagatagatagatagatagatagattgattatagatagatagatattatatagtaaaaattacatttttacattgtattatttttataacacaaattatatatatagtggtaaatattatatatatgaatatacatattaagagatttttttaataagataatggctcatacaaatatgaaggctgaaaagtctcaccatctactgcctgtgagctggagacctagatgagccagcgttttagtttgaaggcctgagggccgaagcaccaatggtgtagattccagtctgagtctgaaggcctgagaaccagaaacacccaggacagtagaagaccaatgccccaattaatgcaagcaatcagaaagaaggagactttaatattcactttagagaagagtaatacaaaaatcaaggatcttagcatttttttttttttttttttgagacagagttccactctgccacccaggccggagtgcaatggcacgttctcggctcactgcaacctcccctccaccttctgggttcaagtgattctcctgccttagcctccagagtagctggcattacaggcgtgcaccaccagctaatttttgtacttttagtagagacagggtttcaccatgttggccggctagtcttgaactcctgacctcaggtgatccgctggcctcggcctctcaaagtgctgggattacaggcgtgagccaccgcacctggcctaccttagcgtccattttaagaagtaagaaaaatgagttccaagtggattttagatctattgtgaaagacaatgtttctaggagaaaatataggagaatatcttcatgaccttggtgtagtcaaagatttcttaaaacaaaacaaaaaagtacacattagcgataaagatgataactttaactatgtttaaattaccttctttcatgtgcagtcaccattaaaggagaagccctagtaagaaaatatatatattatagaaccaacaaaggactcatatccagaatgtataaaaacacgttcaaatcagagaaaaagatagacaaaagaaaaataggcaagcaacatgaataaacacttcataaagaggataattatctttaattgtcctcatatccttaaattattattaagtggttaatgagagaaatgcaattaaaaccactgagacataaccatatccaccaaaatcagtaaaattagaaaaactgacaatagcaagtgttgacaaggatgtggagcaatgggacctgtcatacacagtactggtatgtgtaaattatccactttggaagatagcttggcattttctactagttaactatatacatatcctataatcaaaaatcccaatctgaggtatatgctcagtggatacagaggcatatatgtactaaaagtcaagaagtgttcattatggcattgtcttaatgactagaaacaaccaatgttcatcagtagtaaaatgaataaataaattgtgtttattcagacaattgaatattatacagcaaggaagatgaacaaactacagctacatgcaataacataaatgacttataatcaaaatgttaagccaaagaagtttgtttacatgtatttaatgtgaaaaatgaggtaaaactaaactatagcattaaaagaagcatctttaagttataaaggtataaaggaaaggatgaaaatggtcaacataaaagtcagcatacctttggcaaaaaaaaaaggatgaattataaactagaaggaagcaccaggacttcaggggttctagcaatattctatttcttgacttgggtggtggttctacaatagttttctctgtgataatttgctgagctttacagcaaatgtttatactgtgttatatttttctctacatgtgttttatttcacagtaaaagggtacataaatataatacaaatctgaccttgccaatgaccccccttgccctcagatagaatttaatctacatgccttggcttcagaacacttccaaatttgctcttccttatccctctaagctgatctctctgcaaccctcacatcacatctggtagggtcacagtgaactaacagcagcttccagaacgcaacctctcacatctcacagtattttcatatgctgttctctatttaaagctccttcctcatcctcatttatctgatcaagtcttagccacttttcaggagtaacttcttccttgaagcttttctgctcttccataggtgacatgcgggcctgtgattctcctgtgatgacacctgccacatcatgtgggaaatttctcttcacttttttggagtctacaggacagtttgtccccctagggcagagaaactctcttacttatcttttggtcttcagagctttaatcagtgcctgtcacatgggggtctaaagacgtttatcaatacatgaaaaaaagatggaatagtgacttcattcttttttgtgttatccaggtagacaatgaacaactgaatttagaggacgaagacattgaaagcattgatgccaccaaattgagccgtttcattgagatcaacagcctccacatggtgacagagtacaaccctgtggtaaacaatacttcctgttcttagtcccttcagaccctgagtcggggaaggtactggtcttcataacagaggtctcttcctcccagagttccaattcttcgaccaatacaatactgtattgtttatgttactatccttcctacacctttttaagatttaacttgttcctgttagacaaaaaaacagagaaaagttaaatgaactatcacactgctagtaagaaagagaaccagaatgcacagttaaggtgactaactcaaggccaggtgcagtggctcacaaatgtaatcccagcactgtgggaggccaaagcatgaggatcactcgtgtccaggagtttgagaccagcctgggcaacatagcgagaccttgtctctaccaaaaacttttaaaattagccaggtatgatggtgtgtgcctaaaataaaataagaataaatgaaagacaaacaaaaaaattttaaatgaagctcactgatcacatatttggatgtcacaggaatgtaaagtttctgtaattgtttctaaacaaccatttcattttctgtatgtacctccttgcagaccagtaacaaacagttcctggtctggcagcagctgcaaaccatgctttgactagcaagtgcctacaccctcaccatgcctcagccttctctcctggtgtgtcttcctctggtgttgcatgctgcatgcaatctgagtaaaggtggtgctccacctgtcctgatcaccaaatggacttctaacactttctatagactataacagtctacagaattatcttatgtgtcccatcctttattttccctgacatagattacagaaccttacagggtattaatttctagtgatctacatcagctcaaaatgctgtaccttctattctccaataccagttctttacatgcatggtatgatttttgagaacttacagagccctttcatcctcattttttcattcaatcctcatattgattttttttgaggtagaagagaggaaattattgtgtccattttatagaggagaacattcaagatccaactgataacattattcaaagtcacatcatgagtaaatagaaaaggcataatttaagggacaaaatgtaactgatgcattagcacattttgccaacttccattttacagtagagtaaatgggagttcagaaaatttaagtaacttcttcaaagccctatggctagtaattcaagcttcagagacagcctatgtagttgcccttgcttttttatgactggtgcctgtgactgaatcctgtggttgtctattgccctacactgccttcaacaggaaacaccccttttcttgtggactaaaatctggcctacctctcacaccatctttatctctgtggagttggtgactctatttccacttctgctaaggctccaaacacatatgcccctggggtattggcagtaataatcaaaaaggtgttcttctgcatgtggggccagaaaagatgatcttatggtccctgggctatggcctccgtgttgtggcattttgcaagctagctaaggcaggggcatgcactaaccttcctggtttcttatgcctgatctgtctctcatttcgcagagcaatgacgtatcttttttaagttccatattattagtgaaggcagattatatcaagagaaaattcagtaagaatttctttaaagaagcaagttcaatctgtattgttactttttttatttcctgaaagtaatatttttctcatttggagaactgcccattctactatagctgtttctcatctgcttctggtgcaaaggtttgcaccagtagcaactgggcagaaaatcccagccatgcacctgacctgccacgcacttttaatgcacacactcagtacttggcgtcaaggtgtctgttaggattaaatgaatccattcggctatggtcaatcccttctgccaagataactgtaccttttgacatcttagcttttatttctttactcttcccaggaattatcctccatctcagtgttagaatagtgaatgaatgctctaaatttaagtagcaggatttagtaaaacaagagtaaatcatgtgtcatccaatctcccaaatgaaaaatctaaaacttgattttaaactccacggagaaatctttaggaaaggacctactgggccctccttgcctacatattgtaggcagccaaaagagctggagaatctttacaaacttgtgtaaaaaatcaggaagaattctacctagctgtgcccttccccatcctcctaagactctgaccaaagatttgttaacccaccatgttctctctcttcctgtgtacacactagttttgtagcaatgctttctgaatttaggagaggtgaaaagagatgagattggtttgaagtagactcgcagcattatttcaggacagtgaaatgaagggaaccagtgccatggattcccctctttttcttctcctctgtctgactggtggctgttccactcctctaagtcattgacaacttcatggaaaaatcaccatctctaatcagcaaaacaaggtcaatgcttctggtctcctgaagagctcaccttctgctgacctttggtacattggttcaaccacatttgagatcgagtttgtttatatggggttttgctatccactgtgcatgaggcagtccatcctgatgatcaagagcatggactctggagctagaccacctggtgtgaatccctgtctgccatttatttgactcttggagaattagtctatctatgcctcaatttcctcatttgaaaaactgggaccttgaagattaaattacttattctttgttaagagttggagacagtgccttccacgtaatgaacactcaataagtacgaactactaatatgtactcaaacaaagactacattttaagtgtctctgactagtcttgcaacaagagagggggctgaaataaagtgactaatatgttacatagtgtattagttgtctattgctgcaaaacagattactccaaatcttaggagtttcaaataaaaaacattgataatctcatgcagtttctgcaggtcatccaatttggggtggctagggctaggtgcttctggtttgaggtctcttgggaggttgcagtcattggtcagggctgcagtcatctgaaggctcaactggagctggggatctgcttccaagatggctccctcacatgaatagcaagtcaatgctggctgttagtagaaggacttagttcctggccatgcgtttctcctcagaggactgcttgagtgccctacactggggctggtattcctcagagtgagagatagagagaagagcagaaaccataatgtcttttaagacttcaccttggaagtcacactccatcatttctgcaacattgtcttggttactcagttctgccccattcagggtgggaaggaaggatctacacagttgcatgaaaacgagatggtaagacttaactgagagccatcttggaagctagttccatttgtgttaccagtggccagctctcatttaagtttcaatctacctattcactccttcccaggtactaatgcattctttctcgctttcactctactgtaacacatttcgacttgccagactgtgattgggttattcaacagcgtaattcagattcatctcctcctgataatgaacaaggcctccccagagtatgaagagaacatgcacagataccagaaggcagccaagctcttccaggggaaggtaaggcaagaatgggaatatcctattgcatacacacctccaggacactaggaaaagggagatggggctaggaagcagagataaataaggaaaacaactatggttaggagatagcaaagcaagaagtaggacataataaatcacattatttgaaattagagatgttgtattttatcatattaaaggcatatgtaattatatcttcctgtagtgattaagtgtgggttttttcctgcattgattagtagagagaaaatagagatccaaagagactgaaagcaaaatcacctctaagtcaccatttgtttaatccttcccataatttcatagagatttagacctcagggctcatttctcatataaaacacctatcaagtacctggtgcctgctcaatatacaatgaatatttctttctttccctcccctcctttgtggagttctgcttgatattactgaaatagtaaaacttcaactacttcaaggctactgtgcctaactagtgactgttctaatgatgagaactgtctggtaataaaataagcgcctttctgatggttggttctctaacactgaaagtatttagtgttactgaaagtagacaatcatctgatcagaatattataaagaagatttctactttgggttgaaggtttgatttaataatataaaataatctacatttatcaagcacttactataggccaaaagctgaataaaaatattaatgcgttacctcatttaatttcccccaccaaaagcccattttgccaatgagaaaactgagtctcggagaggctgagtaatgtgcccaaactcacgtaactagagagtaccagaggcagaatttaaaacgtgctctctgctcctaaccattaggctatacttcctttcttaggtaatcactaaagtaatttccaattctatgttcttaaaattaaatcaatctcgtcaaagggataaaacatcaaagcaacacaaaataataggaaattcattttttttaacttttaagttcaggggtacatgtgaaggcttattacgtagttgaacttgtgttatgggacttcgttgtacagatgatttcatcacccacacattaagcccagcaccaaattgtgatcttttctgctcctccccctcctcccaccctccaccccccaagtagaccacagtgtctgttgttcccttctttgtgttcaggagttctcatcatttagctcccacttagaagtgggaacatgtgatatttggttttctcttcctgtgttagtttgctaaggataatagcctccagccccatccacgttcccacaaaagacatgattttgttctttgttacagctgcaataatttattttaactcaagatttcaatttcatggtgcagaccataaattcaatcagtgtgagctgcaacaattacaaggtatctctttatccctggacgtcacctcagatagaactttttctttcaaacttccccaactgcagattctctttattctggtggacagtggtatgaaagaaaatgggaaggtgatatcatttttcaaactaaaggagtctcaactgccagctttggcaatttaccagactctagatgacgagtgggatacactgcccacagcagaagtttccgtagagcatgtgcaaaacttttgtgatggattcctaagtggaaaattgttggtaagtgtgagactgcaggtaaagcaaattgttttctttctatgtcccttttatttccagttgaataagaattctttgggctcagagagggaggagagcaaaatgttggttaatggataccaagtgcagatagataggaggaatgtctagtgttctgtagcactacagggtggctgtcattaagaacaatgtattatatattttcaaatagctagaagagtagattttgaatgtttccaacacaaagaaatgataaatgtttgaagcaatggatatgctaattgtcctgatttgatcattacaagctgtatacatgtatagaatatcactctgtaccccataaaaacgtaactattatgtgtcaattaaaaacaaagataaaagcaaaaaaattaaagttaaaaaaattatttgggctctactagatttgattaaaagcaaaagtctatgaggatatggtggccggagtcaggatgcttgttaggatatatcgtgagactcaaactagaaaagcatgtttggaaaggccttgcatattcagaggctgaattttggatttcagcatttagtgtaaagcattaatgggcaacaaatcaaacttcatataacagggttcatgagataaaaattaaagaaggatttaggacttccaggagtaaacagctcagtttactaatctaaatatcattgttataatgttttccagaaagaaaatcgtgaatcagaaggaaagactccaaaggtggaactctgacttctccttggaactacatatggccaagtatctactttatgcaaagtaaaaaggcacaactcaaatctcagagacactaaacaacaggatcactaggcctgccaaccacacacacacgcacgtgcacacacgcacgcacgcgtgcacacacacacgcacacacacacacacacacagagcttcatttcctgtcttaaaatctcgttttctcttcttccttcttttaaatttcatatcctcactccctatccaatttccttcttatcgtgcattcatactctgtaagcccatctgtaacacacctagatcaaggctttaagagactcactgtgatgcctctatgaaagagaggcattcctagagaaagattgttccaatttgtcatttaatatcaagtttgtatactgcacatgacttacacacaacatagttcctgctcttttaaggttacctaagggttgaaactctaccttctttcataagcacatgtccgtctctgactcaggatcaaaaaccaaaggatggttttaaacacctttgtgaaattgtctttttgccagaagttaaaggctgtctccaagtccctgaactcagcagaaatagaccatgtgaaaactccatgcttggttagcatctccaactccctatgtaaatcaacaacctgcataataaataaaaggcaatcatgttataggagaaa

SEQ ID NO: 288 - DNA, 19609 bp, Homo sapiens
cctgcctgacatctgggtagggggtttgtccctggaattctgggacactggctggggtttgaggagagaagccagtacctacctggctgcaggatgaagctggccagtggcttcttggttttgtggctcagccttgggggtggcctggctcagagcgacacgagccctgacacggaggagtcctattcagactggggccttcggcacctccggggaagctttgaatccgtcaatagctacttcgattcttttctggagctgctgggagggaagaatggagtctgtcagtacaggtgccgatatggtgagtgtgcggtttctctttctgtaaaaactgttgctggtggacccatggacagccccagagaggtcacgatctgtcttgcactttttcctgttatccacttagagctgccagatttagcagataaaaatgtaggacacccagtgaaatgtgaaatccaaataaacaacaaataagtcattagtataagtatgtccagtgaaatatctgggacatacttatcctgacaaattcttcgttgtttatctcaaactcacatttcactgagcttcctgtattgtatctgggaaaccttccctgggccattttaatgagtttgttgtgaggcagttcttaggaaaaaagggtacctggggtgggaagaaggagggtgggtatgagaggcctctgtgaggagttcccagggatgaaaactgaagccgaacattcagagaaaaatctgccatggggcaaaaccacctcctcagctgctctgtgctcagcttggaaacaaattctcccttccccctgctgcagttcacaccgtcctcccagctctcagtccctgactggcatcaatttgctggactttctcaagggagctgtccctgcctgcagcctcggcaacgacaggcatgctgtggagaggaagggttcgtggctcaccagggatcccggggctgtcccctggacttggcgccagatgcagatttgtgagctggcaggagcacttcccctaccttgcctgaatatggctgggggtacacagatataaggtgcacacctggctgccggcacagagcccctggtcccaggggccctggaagttaatgtaaggggagcaaaatgtggagccccaggccttgaagctgggtggcatcgtgtaattgccaatgcgcatgaaaacgttttccaaagcatgcacagtctcaggtctcaggtagcattagttttatggtttaatttatcaactatctcatcaagggattagaaatgaaaatggtgagtcaatttagcctaacaggaaaacacatttgagaaatattttctccaaatactcaacagagaaaaagtcagctttgaagagatgcacaaaaaaactacatacttcccggactcacccttaagtctctctattcctttttgagtggggaaaatcgcttccttatacactaagagtgactaggaggtaatggttaatcattgcatcaggacccaaagttttgcagcatagatgttttaacaatctatggttaaaatctatgttttaaccatctatgttttaaccatctatgctgcagcttctttgtgaaagtttcacagagaaaaatgcctggtctgttaggacccacctggccctaaaaccatgtatttgtccaaggcagttggaccaacgcagaggccttgccactggattatgctcacactgtttgcacggatgggacagggaaggggttgactcacttcagacattggaatcaacacaggtgttttccttcctaaaggcaacacaggactagtatctgtagttcagcaaataggcaacagcaggaatttttattaggaaatcaagaaccaaatcctattcttccttctctagcaaaacagcattaaaagacttaagcaaattttagttgcggagcctctggctgggcagggtggaagccagcagcaactggtgggggatgggaagagtaaatagaagagaaaggcaaataactcttctcactttgtgtaaaacaacctgctcaaagaggggcctgaaaaacacttagaaaaataggcggttatgcctccttaccttggaacccagtagagccaaaaacctggcggctgtgcccaaaagagtacaaaataccttctcaaactgattgtgaatcgagcaatcttttgaacagacaacacctaacaacgagtctgctcttttgtagtttgctttgtgacacatctctcatgcaccgtgctcgtcttttaagtagtggttctcaaactcacctgtgaattgaagcccctggagggcagattcaaccagatctctgggccccaccccaggtgtttctgattagtaggagattctgggcttaggagatcctcctgcctcagcctcccagttagcttgggctacaggtgtgcgccaccatgcccagataattttgtaactttttgtagagcagggagtctcaccatcttgcccaggctggtctccaactccagggctcaagcaatcctcccaacttggcctcccagattgctgggattataggcgtgagccacggcaccagccagattttacctttgataggtactaactactatttaaaacagtgggtttctaacttgggtacacttcagatcacctgaggggctttaacaacacctggcaccaaatcaattaaatcaaaatttctgtgggttggccccagacatcagtattttaacatttttcccaggtgattgcaaagcacagccaaggtaaaggggtgccattctatgacgtcattcttagagaacttcagcccacaggttaaattatgcaggcagataaaactgtgtatgtatcctggtagcccatgatagcatgtcaacattgttttccgtgcttctcatatctaaagtaatttgttctcatgccaacacacaaaatctgtacttgtcaaacaactgggctataaatatgacaagatccagcgtgtgtcaatggcatacctagcacaactgttattaaggagtctctaccagctgggtgcggtggctcatgcctgtaatcccagcactttgggaggccaaggcaggcagatcacgatgtcaggagatcgagaccatcctggctaacacggtgaaaccctgtctctattaaaaatacaaaaaaaattagccgggtgtagtggcgggtgccagtagttccagctactcgggaggctgaggcaggagaatggtgtgaacctgggaggcagagcttgcagtgagctgagatctcaccattgcactgcagcctgggcaacagagcgagactccacctcaaaaaaaaaaaaaaaaaaaaaaaggagtctgtgccaatgcaaacaagatttccttgagaatcgcttccaaaatatagataaccttttccacctccagagattctgatgcagtaggtctgtggtgagaccttggaagtgcacttttaatgggtagtctttgaaccagactttgagaaataagcatagtaatggaaaaatcatgggtttgaatttaggagaaaatatcccattgctggtgaccttgggtgagttatctgactctctcaaccttagtttcctcaaatatgtaaaaataatgttactaatacccaccttgcaaaggtgttgtgagaattaaagataatatacataaagaatcagtggtatatataaagcatggtaggtaccaaacaaattttataaacgttatgagaaagacagtctagtgaacaggttaattgcattcagattcttctagctctctttcaacgtaaaaatgaaaaatcccagaaatcccagtggctggacaacagcctctcagcttccggaagaagtccctcgagggaacaacgactgaagagttatctgcctcatgaaggtctctggagttgggtcaatggagtagtttctataatgatactgttcacgctttcacactttaataaaagatcctgaaaatgaatttcttcctggatttagttccaagagtatcttaaaagtttctttaaatatctgtctattgtaatcccagcactttgggaggctgaggccggcggatcatttgaggtcaggagtttgagactagcctggccagcatggtgaaaccccatctgtactaaaaatacaaaaattagccgggcgtggtggcgcgccctgtaatcccagctacctgggaggctgaggcaggagaatcacttgaaccctggaggaagaggttgcagtgagccgagatcgtgccattgcactccagcctgggcaacagagcgagattaagtttcaaaaataaacaaataaataaataaataaaaataaatatcagtctattttttaaagagaatttttatctgaagttttacagcaaaattttataaacctgtgagtttgtatctttttccagggaaataactcaaagacttcatcagattctccagggaatccagagcccaaaaaaagaaaacagccactggcttagaggcaaacagattattcttgtttttgggcaactgacctcctagtctgctggggactcaaggaggaggggagatgctcctgggatgtgagactttcagtactaacaccgggacgggtaccaggcaaaccaggacaagttgctcaccctactttatgcagtaacttaatctgttttagtgactgaaatacagagttcttctctacaggagaattgcctctgtcctgctgtgttccattgatgtattaatcatggtgcatctgagtgtttctgggaggaaggaggacatacctttctttcttttttttttttctggaattttgtttttcttgagacggagtctccctctgtcacccaggctggagtgcagtggtactatctcggctcactgcaacctccgccttccaggttcaaatgattctcctacctcagcctcctggcgtagctgggattacaggcatgcgccaccacgcctagttactttgtatttttagtagagacgggggtttcaccatgttggccaggctggtctcgaactcatgacctcaggtgatccccctgctgggcctcctaaagtgctgggattacaggcgtgagccaccgcgcccggcctggaaattattttattttctcatgtttgagacagctagttggggttgttgatgaagccatgcctataatagtttagtaaatactcttattattcattcgttatcattatctgttctttgtaacaatataatattaatagaaaaatcatatcattgagtggaaaattgtaaaacaaatgacaaagacataatatgtatactacaaaaaggttcttacaaactgtgaagaaataggcaaaagatctaaaagaaaaatgagcaaagaatggaaataggcaattaacagaaaagaaaaactaaatggtttgcatacaaataatatggtcgaattcagtattgatcaggggcttacaaattaaagtaacaatgagataccacttttagccaacagagtggcaaaatttaaaagaagagtgataggaactattgctgtccgagataggaaaaaagcactcccgtgaatttcttttggaaatataaatgttaatcctttttttaatgttgatttttaagttctggggtacatgtgcaggatatgcaatttggttacacaggtaaatgtgtgccacagtggtttgctgcagatgtaccttttaataaagcatactcactccctcctagcacctttgggggaaccagctgggtggagaggatggacgcaccctcccgggaaggcaaaactcttgccctgggacacaaagccctgaaagtttttactgctgtttccagtgacagagagataaaagggcgggcccgggaggcagtgtctaccgctggcaggtagagctcttgggattcttggctaacacttctcgatctccctccagttggtcttttaagacttttatggtatttcactttattcagaagcttttaagttttataagatcaaatctgtcagtctctttctttatggcttctgaattttatgtcttgattagaaaatcatcctcacatcaagattagaacagtattctgctgttttttctgtgacagcagccatagctaaatcataatagtgtggctgtgttccaataaaactttttttatgaacactaaaatttgaatttgaacaggatcaagttgtcggcctctcactcctataaacagctccagccagaaaataaaacatgtgtggatatgatacattattaatgcctagacttaaaacatcaaccataagctactgaaacaataatttgaggatatggtatccttgaatgatttctgtttctgcctagactgaaaccattaccttttgtcttagaacttatattttcagcttcgtttctaaatagaatttctgcagttaacataaaacattaaataaaataaaaataaccatcatcagctgcaggccggataggaattccattccggtatctttcaaactagaatagcagagttttatcttctgtgagttatcaagggcaaaaaggcagagggtaacccaagaaaccgagccaagtctgtggcaaatgcccttttcagcaaaattattaaaaagatgtttcactctctggctgggcaaggtggctcacacctgtaaccccagcactttgggaggccaaggagggcagctcacttgaggtcaggcgtttgagaccagcctgaacaacatggtgaaaccccgtctctactaaaaacacaaaaaattagccgggcgtggtggcaggcgcctgtaataccagctactcaggaggctgaggcaggagaatggcttgaacacaggaggcggaggttgtagtgagctgaaacgctatcttgagtgtggggctaccatgatgagactagtgtcctcgtaagaagagaaagagaaagaagagaagacaaggccgtctgcaagccaggaagaaggccctcaccagacacagaatgcactggcaccctgatcttggaattcccagccttcagcaccgtgaggaataaatttctgccgtgtaagccatccagtctatgttatttttgttatagcatccaaactgcctgagacagggaatgactgctgaatgggcacaaggtctaccttgggggtgatgaaaatgtttttgagctagataaaagtgatggttgtacaacattgtgaatgtatttaattgcatactttaaggtggttaattttatgttatctgaatttcacctcaataagaaaaagaaggctgggtgctgtggctcatgcctataatctcagccctttgggaggccgagatggatggatagcttcagtctgggaattcaagactagcttgggcaacatagccaaaccccatctccacaaaaaaatacaaaaattagtcaggtgcagtgacagcacttgtagtcccagctactagggaggctgaggtgggaggcttgcttgggcctggagatcgaggctacagtgtgccaagatcacaacactgcattcctgcctgggtgacagagtgagagaccctgtctcaaaaaataaaataaaataagaaaatgaaaagaagcagggcacagtggctcatgcctgtaattctagcagctcattaagctgaggttggagagctgcttgagcctaggagtttaagaccagcctgggcaacatagcaagaccccatctctatcaaaaaatttacaagttagccatgcatgatggcatgcacctgcagtcatagctagttggacagctgagataggaggatcacttgaacctgggagtttgaagctgcagtgagctatgattgtgccactgcactgcactccaacctgggtgacagagtgagaccccatctcttaaaaaaaaaaaagaagatgaaaacaaataaatagttacaccatcaaaaacgtgaaaagacaacccacagaatggcacaaaatatttgcagaattgacaaggcttccaaaatatataaagaacacttacaactcaacagtaaaaagataaataactcagttatagagtgggtagaggatttaagtagacattttccaaaagaatttatatgaatggtaaataaccacataaaaagatgctcaacataatcattatagaaatgcaagtcaaaactactgtgaaacaccacctcactcccactaggatggctacaataaaaaagacagacaatagcaagtgttagtgaggatgtggagaaatgggaaccctcacgcattgctgctgggaatgtggtgcagccactttggaaaacagtgtggcaattccttaaaatgttcaacagggttaccatatgacccagcaatcctattcttatggagaaatgaaacacatgttcacacaaaaacccgtctacaaatattagtagcagtattattcatgatagctaaaaggtgaaaacaacccaaatgtctattaaccgatgaatgggtaaaaaaatgtggtatgtctatacaatggaaggtttttctggcaataaaaagaacttaagtactgatacatactacaacatgtatgaaaccagaaaacattttgctaagagaaagaagccagacacaaaaggccacatattgtatgatttaattcatatgaaggagttgcctagggctgggggtagggagatgggagaggtggttaatgggtacagggtttctttttgagattataatgttccaaaattagattatggtgttgactggacaactctgtggatatgccaaaaccattgaatcgtacacattaaatgagtgaatgtatatgatatatgaattatagctcaataaagctgtcatagaaaaaatataacaaagagattaaaatcataatggcaggccaggaaaggtggctcacgcctgtaatcccagcactttgggaagccaaggtgggtggatcacttgaggccaggagttcgagaccagcctggccaacatggtgaaaccccatctctactaaaaatacaaagattagctgggtgtggtggtgcgtgcctgtaaccccagttactcaggaggctgatgcaggagaatcacttgaacttgggaggcagagattgcggtgagccaagatcgcaccactgcactccagcctgggcaacagagcgagattccatctgaaaaaaaaaaaacatcataatggcaactgcaacagttatatattattgagcaaaaaggtacctcgaaactcagcagcttacaatagcaaagattatatcacacacttgctgagggtcagggatcctggagtggctttgctgggcgattctggctcagtttctcataaagttgaggtcatgctgcccagctgatgctgccatctctggagattcagctggggctggaggatctcttgttaaattcatgtggctattggcaggaggttttagttctttgccgcatgggtctttctatgggactgttcatgacataacttcccctagagtgaacggtgagagagagggagagtaagagagcccaagacagaaatcatggtcttttatagcttaatcttaggaggaacacacctccacttctgcagtattctctgggtcacacagaccactcctgggactatatacaaggaggtgaataccaggaggtggggatcattggaagtcatcttggaccacaatcttataaccacatgtatcacagcaacaaatacccaaactgtggcagaaactgcttagtgtcccctaatatccattcttccccttttctacagtataaagcccctccttccacgttttagctgggctcatggctgcccacttcatttcctagcccaccttggcaaccagattttgccatttgattaaggtctggccagagggaagtatgaggaagtgacgtgtataacattctggagtgtgtttactgaagagaggggctggacccttccaactcctgccatcctgctacaggtaatatggatgtgttggctgaaatgccatcttagaccatgagagccagggctacactccagggctggtagagcagaaagctagaagcagcctgggttccaggaaagtgcagatttactataccagaggcatgagtcttagctctggatttttatgagatattctatcttgtttaaggatctgaataatataggtatatagaaagtataatatacaatatggagaaaattgcagtgctctgttgaatgacatacagaaagacctaagtaaatagagaactataccgtgtccatatttgggaagactgagtatcctaagaaaggcagttgtctccaaatctatacattcaatggatttttcaatcaaattcttggccatttttcttgtagaatttactaagttgattctacaaattcaaaaaaattgcaaaattctttgtgagagtaaaggtccaagaataatcaagacaattttgcagaatgatacgaagtgagggctttaaaacataaacttagtatctaaaaattaaaacagaatgatgagtgcaaagaggcttcaactgcacctgaacctgtacttgaactgtcacatttaattaaaaaaaatttatagcaagtttggcaaatgttaacatttattatgtttgtgcatttggtacatggctgtttgtttctctgacttttcaacagttttgaaatatttcatgatataaaataattaaaaataaatacctggtaggagaagaaggaaggaaggagaaagaaagaaagaagaaaagcagaagaagaaaaggaggaaggaaggaaagaaggtgggaaggaaggaagaaaggaagaaaggaaggaaggaagaaagaaaaagaaagaaaggaagaaagaaaaagaaagaaagaaaagaaagaaagaaactgtcatatgccttactctaaggattaattattcttagcacatttccccagtcttacactagggtcttgtatctcctaaaaagaggcagatatgtggtgaaggagcataggctttggagacaaacaggaaatctgactttatatcctatttcccccactttctctatgatggtaggcaagtcatgcgacctcttagcccgagtttcttatctggataatgggataaaatacccactgcagatggctgtcctgaggtcatctcaggtcaaggttatctttacctgtgagcactgccattgatacaactgataaagcttctctctacacatttgaaagatcttaaaaaacagaaattcaaagctgttcagatcatttctgcttagttctatgaaagaaatgcctaagatatcacatcagggtaatttctttgctctttactcaataatactctgtctacgtttatggaatcttgcttgaatttcctgcaagttaaacccttttgtggtgctgctacaattcggattccttaagtgtacgatcaagttgtgttctgcttgttctttgagtggtgtgtggtcttgcagtgaaggaatgaggaaccttgagttttagttgggttttgccatggcccttatcttcaatgttatgcacttaaaaaacattagaaatgtcagtaaataagtgcttattgggtgtggtggctcacgcctgtaatcccagcactttgggaggccaaggcgggtggatcacttgaggtcaggagttcgagaccaacctagccaacatggtgaaaccctgtctctactaaaaatacaaaaattagctgggcgtggtgacacatgcctgtaatcccagctactcgggaggctgaggcaggagaattgcttgaacccaggaggtggaggttgcagtgagccaagatcacaccactgcactccagcctgggcaacagagagggaccctgtctcaaaaaaaaaaaaaaagtgctcatgaaattttttgagattaggggaaaaagtcaaagtggtttgaaagtcattattcttctgtgacatcatcatcatcatcatcacctgatttggatgtgaggaacagtgacttttaaagaaaaagtgaaatatgcttttagaaaattttcatttgatgaatgttcccaaatgcttgatttctaaatatttcttcttgcttctttcctttcttcctcctgcaaggaaaggcaccaatgcccagacctggctacaagccccaagagcccaatggctgcggctcctatttcctgggtctcaaggtaccagaaagtgtatgtactgccagcattaccttcttggttggttggttttgactgagagcaatcctagagttatccttgatggaagtgattatttctggaaaaaagttgaagaatacaattaagtattttaaattggatatgagggagagaatttttaaagaagatatctgatttccttttctcagggacagctgtccctcagataagcccttggtagtggatcagaactttgaaatcaccactgaaaatgtcagctgaggcttagggcatcatgacataacttaatttgagatagatctgacaggtttgacttattgaaattagtgaaccattccagtgatgtgctagagccagctggtgctggccagtgagagctgattgttacatattgtcatgacttttgcaagcagctgacttcatgttagtagtgccaaattggctatgtttggagagctgacatcatagaaatctgcacacacacacacacacacacacacacacacacacacacccgacgccctgctaatttttgtatttttagtagaaatggggtttcaccatgttggccagagtggtctcgaactcctgacctcaagtgatccacccaccttggcctcccaaagtgctgggattacagtcgtgagccaccgtacccagacacgtggcattttatgaacttagtgacacagtttatgccactacatttacagttgtttataggatgcttagtaatgatgggtgtgtgtgagatgttgtggtttgaccacagtcctcttgtgatcaggagctgtgtgttctatacccactctactttccaacacacacacccacacacacacacacacacgcacacccttaaaatagtgctgtctgggatgctggtgatcttttgatgaacggaggctgaatttttttttatacttcttagccgtagaatcctttgctcacacaaaatctcatatgggactgttaagtgttaattaaatttagaagccctatggttctgctctcttgactacccttctggtctctattttcattactgtaagctgcctctgaattttaaaattactaacatctgaaaaaacaaaaggtgaaaaatggccagaatcacttactgaactaataactaagtaacaatgaacacttgtaatcctgtgactgttggtattctactgagtcattggtgtttctgaattgatcgggatatgcaacagaaatgtgagaaccagctagttaataacaaggtgggcaaggttgcctaaggtccttagtctaaacgtggcatttcttccccttcttttcccttccttcacttttccccagatggacttgggcattccagcaatgacaaagtgctgcaaccagctggatgtctgttatgacacttgcggtgccaacaaatatcgctgtgatgcaaaattccgatggtgtctccactcgatctgctctgaccttaagcggagtctgggctttgtctccaaagtggaaggtaggtgtctcaatggcacgtacagtgcacagggaggtttgttcctgttttcacaccgagatatagccagaaccccttgactcgaagagatcatcagagctcactgaatattctttatggaacactgtggctgagcaagaaatggtgaaggaaagattctgggcactccttcactcaagttcttgctgtcctgcccgcgagctgctggcaccactcctgaaggtaaaagactacaccaaagtcttcccagaaaaataaaaatctatcatttaaggctggagaaggaattgcccaactggcttggattatccattccactgttaaataattttccatatcaggaattattccttataggaccacttggtttggcttaagttttttttttttgtaattttgttttcagtcagggtaggagttcaaaaaaccttttctgcataaaggtctctatatacttgaggataattattttatttaaattaaaaaaaattttttttgagacagaatctcactctgttgcccaggctggagtgtagtggtgggatctcagctcactacaacctctgctttccgggttcaagcgattcctgtgcctcagcctcccacgtagctgggattacaggcacccgccgccatgcccagctgatttttgtatttttagtagagatggggttgcccatgttgcccgcctcagcctcccaaagtgctgggattataggtgtgagccaccgcgcccagcaaggatagttattttaaacaactgctttgctacctagattctagcaccgactctataatttctttttcctaatttacttaggaaaagtttttactgtctcagtttctgaagccaggatattgtatccaggtatgaattagcattttctatttttagatggtaagagttgaaatgtaggctgataaagagctggctccacaccacagagagtgtctgcagtagagagaattttggatcttttcatagatcaatgtctagagtgcagtctggaggtgaaggtgtgagggcttagaaatgtgaataattcagtgtgccctatgaaagggagtatcattctattctgtttctgcagaggctgaaaaagtacctgctgctaatctagggtcaggtcaagttacttcctgcaagcaatgtcctgttgattcattctcccaaatatctctttcatatcccacttgcctggttactgcaaattaacccagtctctgtgtcccatctaattgatagtcaccattgggaccagatatgccacatgaatgtgatcatctcaaccccctgtgtaaatcattcaatagattcctcctccttacggatgaaatccaaactcctcagtatgccatacatggccctttctgattcagccctagccttcctctccaccattatcttgggcatttctggtctgtctcttgactcctgcttcagtgggctcagaactgtcccttcgtagattctacaaaaagagtgtttccaacctggtgaatcaaaacacaggttcctttctgtgagatgaatccacacatcacaaagcattttcagatagcttgtttctagtttttatcacgggatattagatgtttttcttataggcctcaatgggctcagaaacgtccctttgtagattctacaaaaagagtgtttccaacccggtgaatcaaaacacaggttccattctgtgaggtgaatcctcaaaaagcattttcaaagatcgcttatttctcatttttatcacagaatatttgatttttccttatgggcctcagtaggctcagaaatgtcccttcgtagattctacacaaagtgtttccaacctggtgaatcaaactccttgggttgatggcccattcctttctgcccctgtgtgaaacgccctaatcattcatttttgttgttgttgaaacagatttattaagctacaattcacacatgatacaattcacccacttaaatgcttttaaatatgttcacagagttatgcagtcaatcccacagtcaattttagaacatattcatcaccctgaaaaggagccccagggccattaacggtctctccccaaactccccctgcccagcttgaggaaaccatgaatctactttctacctctagaactgcctattctggacattgtcaaaaatcaattgaccataaaggttaggatttatttctagatgcgcaattctattccactgatctatgtcaggaccatgctgcctgttactgtcgttatgcagtaaattttgaaatcaagatgtgttcttaaactgtgtacttttctgtcaagactattttggatattctggatccctcacatttccatatgaattttaggaactgcttgtcaatttctccaaggaatggcagctagaattttgagagggttatggttgaatctatagatcaatttgagaatattgccatcttaacaagattatatttatatcaatgtcctttccatttatttaggtcttctttaatttatttcaacaatgtgtttatagttttcacagtacaaatcttggacttctgttaaatttattcctaagtattttattctttttaatgttattgaaatgtaattgtatttaaattttattttcagattatttattaataatgtatagaaattcatttgatttttgtacattgatcttatatcctgcaacccagctgaaataactccttagttctaatattttttttcatggattccataggcttttttgtatataagataatgccatctgcatatcatcttcctttccaatttggattttttaaattttttctcttgcctaattgccctggctagagcttccaacacaacattgaatagaagtattgcgagtggacatttttgtcttgttcctgatcttagagtaaaagcatttcatctttcaccattgagaatgattgttagctatgactgtcattagacgacctttattaggttgtgggagttctcctcttttcccagttggttgaatgttttcttttaatttttctttctttctttctttctttttttttttttttctgagatggagtttcactcttacacccaggctggagtgaagtggtgtgatcttggctcactgcaacctccacaccccgggttcaagcgattctcctgccttggcctcctgagtagctgggattacaggtgcccaccaccatgcccagctaatttttgtatttttagtagagacggggtttcgccatgttgtcaggctggtctggaactcctgcctcagcctcccaaagtgctaggattacaggcgtgagccaccacacctggccaagtgtttttatcgtgaaaaagtgttggatgttttcaaatgctttttctgcatctattgagatgatcatgtggtatttgttctatatcctattgatgtagtgtatcatattaattgattttagtatgatttagcattcttaggctaaatcccacttagtcatgatgtaaacctttttatatgttactggattcagtttactactattttgttgaggattttgcatccatattcataagagatactagtctatagattgttatttttgtgatgtctttggttttggtatgagagtaatattgacctcataaaatgaattgggcagtgatcccttctctcctaattttttaaaaagcttagaaaggattgatattaattctttaaatgtttggtaaaattccccagtgaagccaagtagaattggatttctttggggaagtttttaattactaaatcacgagcttgggttagtaattgtatttatatacactagtaatctattcatattttctattcttcttgagtcagtttcagcagttcacgtctttctacgaatttgtccattccatccaagttatcaacattttttggcatgtaggtattcatagtattcccttataatcctttttatttttatttttttgagatggagtctcgctctgtcgcccaggctggagtgcagtggtgtgatctcggctcactgcaagctctgcctccgggttcacgccattctcctgcctcagcctcctgagtagctgggactacaggcgcccgccaccacgcctggctaattttttgtatttttagtagagacaaggtttcaccgtgttagccaggatggtcttgttagccaggaggtctcctgacctcgtgatctgcctgcttcggcctcccaaagtgctgggattacaggcgtaagccaccgtgcccggccctaatcctttttatttctataagattgttagtgacatttctctctcattccttaatttggtaatttgagtcctctctttttttcttggttagtctagctaaaagtttgttaacattttttatcttttcaatgaaccaatttaaaaaaattgatatatcattcacataccgtaaaatttaccctttaaaagtatacacttcagtggtttttgtatattcagagttgtacaaccatcaccacaatctaattccagaacattttcattagtcccaaaagaaaccctgtagccattagcagtcactactcattacctcccctaccccaccccagccctagacaaccactattttactctctgtatggattgcctattctggaaatttcatatgaatggaatcatacaatatgtggccttttgtgtctggcttcttgtgcttagcataatgttttcaagattcatccatgttttggtatgcatcagtacttcattttcctgaccattcttgaagtttaaacttagatatcttacttactctaagatacctctcctaataacccttgctgcaaagggatagagaccctttctgtgggcttccataccaccttgaggttattttcatcatgaggtagtgtagctatctgtttacctgtccacctctttatccaaactgtggagtacttaagttgaggatgccttttgtctctgtatctttggctcctaagacagtggctaaccaacatatccaagccatgcaaatgtttttccatcaatgaatggttgttcatccaatacttgaacagtgaaagctataggcgagattcggtgtgttctgggtggtatggccatagatgggaaagctatgggaaacatagttgttcatgtgagggagtcttctgcaaaaaatattctccatggagtgagcatggtggtgtggggggttctggttgctcaccattgttttgaccaagggcccacatgcgagggcacctccaggtgtcttctgctttactggattggatgggagcttttctgagaacattctctgaaatggatgctcttcctttgaattctgtatttggattactgtctctactttcctctgggtatcatgtcatgcctggaaatactcttcaaaattactcagggttaacctttctgtccctcttcatctttttcaagcagcctgtgattccctggttgacactgtgttcaacaccgtgtggaccttgggctgccgcccctttatgaatagtcagcgggcagcttgcatctgtgcagaggaggagaaggaagagttatgaggaagaagtgattccttcctggttttgagtgacaccacagctgtcagccttcaagatgtcaagtcttcgagtcagcgtgactcattcattcttccaacagtttggacaccacaaagcaggagaaagggaacatttttctacagctggaaagtgagtcctatcctttgaggaaatttgaaaaaagacatggagtggtttgaaagctactcttcatttaagactgctctccccaaccaagacacatttgcctggaaattcagttcttagcttaaagactaaaatgcaagcaaaccctgcaattcctggacctgatagttatattcatgagtgaaattgtggggagtccagccatttgggaggcaatgactttctgctggcccatgtttcagttgccagtaagcttctcacatttaataaagtgtactttttagaacatttggaaagaga
